United States Patent Application Publication US 2021/0277418 A1 - sequence listing, part 2

SEQ ID NO: 26336 - DNA, 21 bp, Artificial Sequence
  Description of Artificial Sequence: Synthetic oligonucleotide
actccgcgtacgcctagtagt

SEQ ID NO: 26337 - DNA, 21 bp, Artificial Sequence
  Description of Artificial Sequence: Synthetic oligonucleotide
acgcctagtgctgcgatgatt

SEQ ID NO: 26338 - DNA, 21 bp, Artificial Sequence
  Description of Artificial Sequence: Synthetic oligonucleotide
acgcctagtgcttctcggctt

SEQ ID NO: 26339 - DNA, 21 bp, Artificial Sequence
  Description of Artificial Sequence: Synthetic oligonucleotide
acgccgtctcatctgatgagt

SEQ ID NO: 26340 - DNA, 21 bp, Artificial Sequence
  Description of Artificial Sequence: Synthetic oligonucleotide
actcctagtaagggtcttgtg

SEQ ID NO: 26341 - DNA, 21 bp, Artificial Sequence
  Description of Artificial Sequence: Synthetic oligonucleotide
actccttctaatgatatttcg

SEQ ID NO: 26342 - DNA, 21 bp, Artificial Sequence
  Description of Artificial Sequence: Synthetic oligonucleotide
acgccgtcgaatcagtcttcg

SEQ ID NO: 26343 - DNA, 21 bp, Artificial Sequence
  Description of Artificial Sequence: Synthetic oligonucleotide
actccgtctccgggtgatgcg

SEQ ID NO: 26344 - DNA, 21 bp, Artificial Sequence
  Description of Artificial Sequence: Synthetic oligonucleotide
actccgagtcctcctggtgtg

SEQ ID NO: 26345 - DNA, 21 bp, Artificial Sequence
  Description of Artificial Sequence: Synthetic oligonucleotide
actcctagttcggctgggatt

SEQ ID NO: 26346 - DNA, 21 bp, Artificial Sequence
  Description of Artificial Sequence: Synthetic oligonucleotide
acgccttcttctggttcgcgg

SEQ ID NO: 26347 - DNA, 21 bp, Artificial Sequence
  Description of Artificial Sequence: Synthetic oligonucleotide
actccgagttctatgcatccg

SEQ ID NO: 26348 - DNA, 21 bp, Artificial Sequence
  Description of Artificial Sequence: Synthetic oligonucleotide
acgccttcttctactcagctt

SEQ ID NO: 26349 - DNA, 21 bp, Artificial Sequence
  Description of Artificial Sequence: Synthetic oligonucleotide
acgccgtctgttgatgcttgt

SEQ ID NO: 26350 - DNA, 21 bp, Artificial Sequence
  Description of Artificial Sequence: Synthetic oligonucleotide
acgccttctgttactcttctt

SEQ ID NO: 26351 - DNA, 21 bp, Artificial Sequence
  Description of Artificial Sequence: Synthetic oligonucleotide
acgccgtcttatgtgatggcg

SEQ ID NO: 26352 - DNA, 21 bp, Artificial Sequence
  Description of Artificial Sequence: Synthetic oligonucleotide
actccgactgcgcgtaatccg

SEQ ID NO: 26353 - DNA, 21 bp, Artificial Sequence
  Description of Artificial Sequence: Synthetic oligonucleotide
actcctactgagactaagtat

SEQ ID NO: 26354 - DNA, 21 bp, Artificial Sequence
  Description of Artificial Sequence: Synthetic oligonucleotide
acgcctactgggcgggatttt

SEQ ID NO: 26355 - DNA, 21 bp, Artificial Sequence
  Description of Artificial Sequence: Synthetic oligonucleotide
acgcctacgcttaagtcgaat

SEQ ID NO: 26356 - DNA, 21 bp, Artificial Sequence
  Description of Artificial Sequence: Synthetic oligonucleotide
actcctactcctgcgtttcgg

SEQ ID NO: 26357 - DNA, 21 bp, Artificial Sequence
  Description of Artificial Sequence: Synthetic oligonucleotide
acgccgactcggccttctgct

SEQ ID NO: 26358 - DNA, 21 bp, Artificial Sequence
  Description of Artificial Sequence: Synthetic oligonucleotide
acgcctacgtctagtgagtgg

SEQ ID NO: 26359 - DNA, 21 bp, Artificial Sequence
  Description of Artificial Sequence: Synthetic oligonucleotide
acgcctacgactagtaatgag

SEQ ID NO: 26360 - DNA, 21 bp, Artificial Sequence
  Description of Artificial Sequence: Synthetic oligonucleotide
actccgacggttccgcgtgat

SEQ ID NO: 26361 - DNA, 21 bp, Artificial Sequence
  Description of Artificial Sequence: Synthetic oligonucleotide
acgccggttttgaattatggt

SEQ ID NO: 26362 - DNA, 21 bp, Artificial Sequence
  Description of Artificial Sequence: Synthetic oligonucleotide
actcctgtgctttcgtctctg

SEQ ID NO: 26363 - DNA, 21 bp, Artificial Sequence
  Description of Artificial Sequence: Synthetic oligonucleotide
actcctgtgcaggcggttgct

SEQ ID NO: 26364 - DNA, 21 bp, Artificial Sequence
  Description of Artificial Sequence: Synthetic oligonucleotide
acgcctgttactattaatatg

SEQ ID NO: 26365 - DNA, 21 bp, Artificial Sequence
  Description of Artificial Sequence: Synthetic oligonucleotide
acgccttatccggatacttct

SEQ ID NO: 26366 - DNA, 21 bp, Artificial Sequence
  Description of Artificial Sequence: Synthetic oligonucleotide
actcaggctgctgcttatcgg

SEQ ID NO: 26367 - DNA, 21 bp, Artificial Sequence
  Description of Artificial Sequence: Synthetic oligonucleotide
actcaggctgggttttcgtct

SEQ ID NO: 26368 - DNA, 21 bp, Artificial Sequence
  Description of Artificial Sequence: Synthetic oligonucleotide
actcaggcgcattttgcgggt

SEQ ID NO: 26369 - DNA, 21 bp, Artificial Sequence
  Description of Artificial Sequence: Synthetic oligonucleotide
acgcaggattcgtttaggcat

SEQ ID NO: 26370 - DNA, 21 bp, Artificial Sequence
  Description of Artificial Sequence: Synthetic oligonucleotide
actcaggagctgccgcgttcg

SEQ ID NO: 26371 - DNA, 21 bp, Artificial Sequence
  Description of Artificial Sequence: Synthetic oligonucleotide
actcaggagaatgtggagagg

SEQ ID NO: 26372 - DNA, 21 bp, Artificial Sequence
  Description of Artificial Sequence: Synthetic oligonucleotide
actcaggaggttgagagggag

SEQ ID NO: 26373 - DNA, 21 bp, Artificial Sequence
  Description of Artificial Sequence: Synthetic oligonucleotide
actcagtttccggcgttgggg

SEQ ID NO: 26374 - DNA, 21 bp, Artificial Sequence
  Description of Artificial Sequence: Synthetic oligonucleotide
actcagtttactcataaggcg

SEQ ID NO: 26375 - DNA, 21 bp, Artificial Sequence
  Description of Artificial Sequence: Synthetic oligonucleotide
actcagggtgatgtttcttct

SEQ ID NO: 26376 - DNA, 21 bp, Artificial Sequence
  Description of Artificial Sequence: Synthetic oligonucleotide
acgcagggtctggatgttgag

SEQ ID NO: 26377 - DNA, 21 bp, Artificial Sequence
  Description of Artificial Sequence: Synthetic oligonucleotide
acgcagggtcaggctaatccg

SEQ ID NO: 26378 - DNA, 21 bp, Artificial Sequence
  Description of Artificial Sequence: Synthetic oligonucleotide
acgcagggtagggattatgtg

SEQ ID NO: 26379 - DNA, 21 bp, Artificial Sequence
  Description of Artificial Sequence: Synthetic oligonucleotide
actcagggtacgcgtgcttgg

SEQ ID NO: 26380 - DNA, 21 bp, Artificial Sequence
  Description of Artificial Sequence: Synthetic oligonucleotide
actcagcatgcggggggtttt

SEQ ID NO: 26381 - DNA, 21 bp, Artificial Sequence
  Description of Artificial Sequence: Synthetic oligonucleotide
acgcagattagtagtatgagt

SEQ ID NO: 26382 - DNA, 21 bp, Artificial Sequence
  Description of Artificial Sequence: Synthetic oligonucleotide
actcagattactgttgatgag

SEQ ID NO: 26383 - DNA, 21 bp, Artificial Sequence
  Description of Artificial Sequence: Synthetic oligonucleotide
actcagaagctttcgatgagt

SEQ ID NO: 26384 - DNA, 21 bp, Artificial Sequence
  Description of Artificial Sequence: Synthetic oligonucleotide
actcagaaggtgagtgatccg

SEQ ID NO: 26385 - DNA, 21 bp, Artificial Sequence
  Description of Artificial Sequence: Synthetic oligonucleotide
acgcagctgaatgttagtcgt

SEQ ID NO: 26386 - DNA, 21 bp, Artificial Sequence
  Description of Artificial Sequence: Synthetic oligonucleotide
actcagcttagtgtgaatccg

SEQ ID NO: 26387 - DNA, 21 bp, Artificial Sequence
  Description of Artificial Sequence: Synthetic oligonucleotide
actcagatgactaaggcttcg

SEQ ID NO: 26388 - DNA, 21 bp, Artificial Sequence
  Description of Artificial Sequence: Synthetic oligonucleotide
acgcagaatgagccgcatctg

SEQ ID NO: 26389 - DNA, 21 bp, Artificial Sequence
  Description of Artificial Sequence: Synthetic oligonucleotide
actcagaatctgtgtgatcgg

SEQ ID NO: 26390 - DNA, 21 bp, Artificial Sequence
  Description of Artificial Sequence: Synthetic oligonucleotide
acgcagcctccgctttcgcag

SEQ ID NO: 26391 - DNA, 21 bp, Artificial Sequence
  Description of Artificial Sequence: Synthetic oligonucleotide
actcagccgtctgctgctgcg

SEQ ID NO: 26392 - DNA, 21 bp, Artificial Sequence
  Description of Artificial Sequence: Synthetic oligonucleotide
acgcagcctagtttgcaggcg

SEQ ID NO: 26393 - DNA, 21 bp, Artificial Sequence
  Description of Artificial Sequence: Synthetic oligonucleotide
actcagccttctaggccgttg

SEQ ID NO: 26394 - DNA, 21 bp, Artificial Sequence
  Description of Artificial Sequence: Synthetic oligonucleotide
actcagcctactggttgtgag

SEQ ID NO: 26395 - DNA, 21 bp, Artificial Sequence
  Description of Artificial Sequence: Synthetic oligonucleotide
actcagccttatgggcatgcg

SEQ ID NO: 26396 - DNA, 21 bp, Artificial Sequence
  Description of Artificial Sequence: Synthetic oligonucleotide
acgcagcagtctactatttct

SEQ ID NO: 26397 - DNA, 21 bp, Artificial Sequence
  Description of Artificial Sequence: Synthetic oligonucleotide
actcagcagactccgaggggt

SEQ ID NO: 26398 - DNA, 21 bp, Artificial Sequence
  Description of Artificial Sequence: Synthetic oligonucleotide
actcagcagacgagtgcgtat

SEQ ID NO: 26399 - DNA, 21 bp, Artificial Sequence
  Description of Artificial Sequence: Synthetic oligonucleotide
acgcagcgggagacgaattcg

SEQ ID NO: 26400 - DNA, 21 bp, Artificial Sequence
  Description of Artificial Sequence: Synthetic oligonucleotide
actcagcgtgggtctgcggag

SEQ ID NO: 26401 - DNA, 21 bp, Artificial Sequence
  Description of Artificial Sequence: Synthetic oligonucleotide
actcagcggccgattacggtg

SEQ ID NO: 26402 - DNA, 21 bp, Artificial Sequence
  Description of Artificial Sequence: Synthetic oligonucleotide
actcagcgtgttgcgcgtgat

SEQ ID NO: 26403 - DNA, 21 bp, Artificial Sequence
  Description of Artificial Sequence: Synthetic oligonucleotide
acgcagtctgcgatgtctgtt

SEQ ID NO: 26404 - DNA, 21 bp, Artificial Sequence
  Description of Artificial Sequence: Synthetic oligonucleotide
acgcagtctgagactgttctt

SEQ ID NO: 26405 - DNA, 21 bp, Artificial Sequence
  Description of Artificial Sequence: Synthetic oligonucleotide
acgcagtcttttggttctgcg

SEQ ID NO: 26406 - DNA, 21 bp, Artificial Sequence
  Description of Artificial Sequence: Synthetic oligonucleotide
actcagtctctggcttctgag

SEQ ID NO: 26407 - DNA, 21 bp, Artificial Sequence
  Description of Artificial Sequence: Synthetic oligonucleotide
actcagtctttgatggatgat

SEQ ID NO: 26408 - DNA, 21 bp, Artificial Sequence
  Description of Artificial Sequence: Synthetic oligonucleotide
acgcagtcgcgtgatatgtcg

SEQ ID NO: 26409 - DNA, 21 bp, Artificial Sequence
  Description of Artificial Sequence: Synthetic oligonucleotide
acgcagtctagtgctctgtct

SEQ ID NO: 26410 - DNA, 21 bp, Artificial Sequence
  Description of Artificial Sequence: Synthetic oligonucleotide
actcagtctagtcagcggatt

SEQ ID NO: 26411 - DNA, 21 bp, Artificial Sequence
  Description of Artificial Sequence: Synthetic oligonucleotide
actcagtcttctactggtccg

SEQ ID NO: 26412 - DNA, 21 bp, Artificial Sequence
  Description of Artificial Sequence: Synthetic oligonucleotide
actcagtcgtctactcagcct

SEQ ID NO: 26413 - DNA, 21 bp, Artificial Sequence
  Description of Artificial Sequence: Synthetic oligonucleotide
actcagacgcgtccggttggt

SEQ ID NO: 26414 - DNA, 21 bp, Artificial Sequence
  Description of Artificial Sequence: Synthetic oligonucleotide
actcagacgactattatgcct

SEQ ID NO: 26415 - DNA, 21 bp, Artificial Sequence
  Description of Artificial Sequence: Synthetic oligonucleotide
acgcagactactagtctgtat

SEQ ID NO: 26416 - DNA, 21 bp, Artificial Sequence
  Description of Artificial Sequence: Synthetic oligonucleotide
acgcagacgacttctccggtt

SEQ ID NO: 26417 - DNA, 21 bp, Artificial Sequence
  Description of Artificial Sequence: Synthetic oligonucleotide
acgcaggttgcgcttaggccg

SEQ ID NO: 26418 - DNA, 21 bp, Artificial Sequence
  Description of Artificial Sequence: Synthetic oligonucleotide
acgcaggtggcgacgtatcag

SEQ ID NO: 26419 - DNA, 21 bp, Artificial Sequence
  Description of Artificial Sequence: Synthetic oligonucleotide
acgcagtggttggcgcagggt

SEQ ID NO: 26420 - DNA, 21 bp, Artificial Sequence
  Description of Artificial Sequence: Synthetic oligonucleotide
acgcgtgcggctctggggacg

SEQ ID NO: 26421 - DNA, 21 bp, Artificial Sequence
  Description of Artificial Sequence: Synthetic oligonucleotide
acgagggcgttgcaggctggg

SEQ ID NO: 26422 - DNA, 21 bp, Artificial Sequence
  Description of Artificial Sequence: Synthetic oligonucleotide
acgcgggcgaatgcgacgaat

SEQ ID NO: 26423 - DNA, 21 bp, Artificial Sequence
  Description of Artificial Sequence: Synthetic oligonucleotide
actagggcgccggcgactatg

SEQ ID NO: 26424 - DNA, 21 bp, Artificial Sequence
  Description of Artificial Sequence: Synthetic oligonucleotide
acgcgtgcttcgactgcgaat

SEQ ID NO: 26425 - DNA, 21 bp, Artificial Sequence
  Description of Artificial Sequence: Synthetic oligonucleotide
acgcgggcgacgggtgatgct

SEQ ID NO: 26426 - DNA, 21 bp, Artificial Sequence
  Description of Artificial Sequence: Synthetic oligonucleotide
acgcgggctgtggatgggcgt

SEQ ID NO: 26427 - DNA, 21 bp, Artificial Sequence
  Description of Artificial Sequence: Synthetic oligonucleotide
actcgggctgtggggggtcag

SEQ ID NO: 26428 - DNA, 21 bp, Artificial Sequence
  Description of Artificial Sequence: Synthetic oligonucleotide
actagggatgagtgggctacg

SEQ ID NO: 26429 - DNA, 21 bp, Artificial Sequence
  Description of Artificial Sequence: Synthetic oligonucleotide
actagggatcgtgggccttct

SEQ ID NO: 26430 - DNA, 21 bp, Artificial Sequence
  Description of Artificial Sequence: Synthetic oligonucleotide
actcgtgatacttcgtatact

SEQ ID NO: 26431 - DNA, 21 bp, Artificial Sequence
  Description of Artificial Sequence: Synthetic oligonucleotide
actcgtgagggttttatggtt

SEQ ID NO: 26432 - DNA, 21 bp, Artificial Sequence
  Description of Artificial Sequence: Synthetic oligonucleotide
actcgggagatggggccgagt

SEQ ID NO: 26433 - DNA, 21 bp, Artificial Sequence
  Description of Artificial Sequence: Synthetic oligonucleotide
actcgtgagactgtgcctgcg

SEQ ID NO: 26434 - DNA, 21 bp, Artificial Sequence
  Description of Artificial Sequence: Synthetic oligonucleotide
acgcggttttgttcgtctcct

SEQ ID NO: 26435 - DNA, 21 bp, Artificial Sequence
  Description of Artificial Sequence: Synthetic oligonucleotide
actcgttttgagaagtatgat

SEQ ID NO: 26436 - DNA, 21 bp, Artificial Sequence
  Description of Artificial Sequence: Synthetic oligonucleotide
acgcgttttcaggttgaggtt

SEQ ID NO: 26437 - DNA, 21 bp, Artificial Sequence
  Description of Artificial Sequence: Synthetic oligonucleotide
acgcggggtggggatggtgtg

SEQ ID NO: 26438 - DNA, 21 bp, Artificial Sequence
  Description of Artificial Sequence: Synthetic oligonucleotide
actagggggacggatttgtcg

SEQ ID NO: 26439 - DNA, 21 bp, Artificial Sequence
  Description of Artificial Sequence: Synthetic oligonucleotide
actcgtgggacttcggtgtcg

SEQ ID NO: 26440 - DNA, 21 bp, Artificial Sequence
  Description of Artificial Sequence: Synthetic oligonucleotide
actcgtggtgtgattaatgcg

SEQ ID NO: 26441 - DNA, 21 bp, Artificial Sequence
  Description of Artificial Sequence: Synthetic oligonucleotide
acgcggcatgattttttgaat

SEQ ID NO: 26442 - DNA, 21 bp, Artificial Sequence
  Description of Artificial Sequence: Synthetic oligonucleotide
actcggattggtcctagtgag

SEQ ID NO: 26443 - DNA, 21 bp, Artificial Sequence
  Description of Artificial Sequence: Synthetic oligonucleotide
acgaggattcatgctttgcct

SEQ ID NO: 26444 - DNA, 21 bp, Artificial Sequence
  Description of Artificial Sequence: Synthetic oligonucleotide
acgaggatttctcttagtggg

SEQ ID NO: 26445 - DNA, 21 bp, Artificial Sequence
  Description of Artificial Sequence: Synthetic oligonucleotide
actcggaagctggctgttgat

SEQ ID NO: 26446 - DNA, 21 bp, Artificial Sequence
  Description of Artificial Sequence: Synthetic oligonucleotide
acgcgtcttaattctattgat

SEQ ID NO: 26447 - DNA, 21 bp, Artificial Sequence
  Description of Artificial Sequence: Synthetic oligonucleotide
acgcggctgccgacgtcgctg

SEQ ID NO: 26448 - DNA, 21 bp, Artificial Sequence
  Description of Artificial Sequence: Synthetic oligonucleotide
actaggcttcagactagtgct

SEQ ID NO: 26449 - DNA, 21 bp, Artificial Sequence
  Description of Artificial Sequence: Synthetic oligonucleotide
actaggcttagtgagaatact

SEQ ID NO: 26450 - DNA, 21 bp, Artificial Sequence
  Description of Artificial Sequence: Synthetic oligonucleotide
acgcgtctgtcgtcttctgtg

SEQ ID NO: 26451 - DNA, 21 bp, Artificial Sequence
  Description of Artificial Sequence: Synthetic oligonucleotide
actcggatggcttcggatggg

SEQ ID NO: 26452 - DNA, 21 bp, Artificial Sequence
  Description of Artificial Sequence: Synthetic oligonucleotide
actcggatgccgagtggggtg

SEQ ID NO: 26453 - DNA, 21 bp, Artificial Sequence
  Description of Artificial Sequence: Synthetic oligonucleotide
actaggatgcctgttattagt

SEQ ID NO: 26454 - DNA, 21 bp, Artificial Sequence
  Description of Artificial Sequence: Synthetic oligonucleotide
acgcgtaatgagtattctttt

SEQ ID NO: 26455 - DNA, 21 bp, Artificial Sequence
  Description of Artificial Sequence: Synthetic oligonucleotide
acgaggaatctggattctgtt

SEQ ID NO: 26456 - DNA, 21 bp, Artificial Sequence
  Description of Artificial Sequence: Synthetic oligonucleotide
actcgtaatatgtctgatact

SEQ ID NO: 26457 - DNA, 21 bp, Artificial Sequence
  Description of Artificial Sequence: Synthetic oligonucleotide
acgaggaataatcatgtgacg

SEQ ID NO: 26458 - DNA, 21 bp, Artificial Sequence
  Description of Artificial Sequence: Synthetic oligonucleotide
acgcggaatcctgagccgaag

SEQ ID NO: 26459 - DNA, 21 bp, Artificial Sequence
  Description of Artificial Sequence: Synthetic oligonucleotide
acgaggaatcctgagtcgacg

SEQ ID NO: 26460 - DNA, 21 bp, Artificial Sequence
  Description of Artificial Sequence: Synthetic oligonucleotide
actcgtaatcctggtactacg

SEQ ID NO: 26461 - DNA, 21 bp, Artificial Sequence
  Description of Artificial Sequence: Synthetic oligonucleotide
actcgtaatcagcttcgggat

SEQ ID NO: 26462 - DNA, 21 bp, Artificial Sequence
  Description of Artificial Sequence: Synthetic oligonucleotide
actcgtaatagtggtatggcg

SEQ ID NO: 26463 - DNA, 21 bp, Artificial Sequence
  Description of Artificial Sequence: Synthetic oligonucleotide
acgcggaatactactgaggct

SEQ ID NO: 26464 - DNA, 21 bp, Artificial Sequence
  Description of Artificial Sequence: Synthetic oligonucleotide
actcgtcctgctccgatggct

SEQ ID NO: 26465 - DNA, 21 bp, Artificial Sequence
  Description of Artificial Sequence: Synthetic oligonucleotide
actcgtcctgattcgctgccg

SEQ ID NO: 26466 - DNA, 21 bp, Artificial Sequence
  Description of Artificial Sequence: Synthetic oligonucleotide
acgcggccgggtgttgatacg

SEQ ID NO: 26467 - DNA, 21 bp, Artificial Sequence
  Description of Artificial Sequence: Synthetic oligonucleotide
actcggcctttggctattgct

SEQ ID NO: 26468 - DNA, 21 bp, Artificial Sequence
  Description of Artificial Sequence: Synthetic oligonucleotide
actaggccgttgccgtcgaat

SEQ ID NO: 26469 - DNA, 21 bp, Artificial Sequence
  Description of Artificial Sequence: Synthetic oligonucleotide
actcgtcctctgagttctggg

SEQ ID NO: 26470 - DNA, 21 bp, Artificial Sequence
  Description of Artificial Sequence: Synthetic oligonucleotide
actaggcctttgagttcgcct

SEQ ID NO: 26471 - DNA, 21 bp, Artificial Sequence
  Description of Artificial Sequence: Synthetic oligonucleotide
acgcgtcctatggagtctgcg

SEQ ID NO: 26472 - DNA, 21 bp, Artificial Sequence
  Description of Artificial Sequence: Synthetic oligonucleotide
actaggccgaatttgccttat

SEQ ID NO: 26473 - DNA, 21 bp, Artificial Sequence
  Description of Artificial Sequence: Synthetic oligonucleotide
acgaggccttctgaggctcag

SEQ ID NO: 26474 - DNA, 21 bp, Artificial Sequence
  Description of Artificial Sequence: Synthetic oligonucleotide
actcgtccttcttatgagatg

SEQ ID NO: 26475 - DNA, 21 bp, Artificial Sequence
  Description of Artificial Sequence: Synthetic oligonucleotide
actaggccgacggctgatgat

SEQ ID NO: 26476 - DNA, 21 bp, Artificial Sequence
  Description of Artificial Sequence: Synthetic oligonucleotide
acgaggcctactccgcttttg

SEQ ID NO: 26477 - DNA, 21 bp, Artificial Sequence
  Description of Artificial Sequence: Synthetic oligonucleotide
actcgtccggtggggacgtcg

SEQ ID NO: 26478 - DNA, 21 bp, Artificial Sequence
  Description of Artificial Sequence: Synthetic oligonucleotide
acgcgtcctgtttatgctgat

SEQ ID NO: 26479 - DNA, 21 bp, Artificial Sequence
  Description of Artificial Sequence: Synthetic oligonucleotide
actaggcaggctacgtctgag

SEQ ID NO: 26480 - DNA, 21 bp, Artificial Sequence
  Description of Artificial Sequence: Synthetic oligonucleotide
acgcgtcagcttctgactgcg

SEQ ID NO: 26481 - DNA, 21 bp, Artificial Sequence
  Description of Artificial Sequence: Synthetic oligonucleotide
acgcgtcagtatacgaatagt

SEQ ID NO: 26482 - DNA, 21 bp, Artificial Sequence
  Description of Artificial Sequence: Synthetic oligonucleotide
acgaggcgtcctgatattgcg

SEQ ID NO: 26483 - DNA, 21 bp, Artificial Sequence
  Description of Artificial Sequence: Synthetic oligonucleotide
acgcggcgtgtgccgtcggag

SEQ ID NO: 26484 - DNA, 21 bp, Artificial Sequence
  Description of Artificial Sequence: Synthetic oligonucleotide
actcgttctgcgcttgagttg

SEQ ID NO: 26485 - DNA, 21 bp, Artificial Sequence
  Description of Artificial Sequence: Synthetic oligonucleotide
actcgttctgcggtggggtct

SEQ ID NO: 26486 - DNA, 21 bp, Artificial Sequence
  Description of Artificial Sequence: Synthetic oligonucleotide
acgaggtcttttgagagttcg

SEQ ID NO: 26487 - DNA, 21 bp, Artificial Sequence
  Description of Artificial Sequence: Synthetic oligonucleotide
actaggtcgggtcttattgag

SEQ ID NO: 26488 - DNA, 21 bp, Artificial Sequence
  Description of Artificial Sequence: Synthetic oligonucleotide
acgaggtctgggactgatctt

SEQ ID NO: 26489 - DNA, 21 bp, Artificial Sequence
  Description of Artificial Sequence: Synthetic oligonucleotide
actcggtctatggtgactctt

SEQ ID NO: 26490 - DNA, 21 bp, Artificial Sequence
  Description of Artificial Sequence: Synthetic oligonucleotide
acgcgttctaatgagactgtt

SEQ ID NO: 26491 - DNA, 21 bp, Artificial Sequence
  Description of Artificial Sequence: Synthetic oligonucleotide
acgcggtcgaatggtctgacg

SEQ ID NO: 26492 - DNA, 21 bp, Artificial Sequence
  Description of Artificial Sequence: Synthetic oligonucleotide
actaggtctaataattcgact

SEQ ID NO: 26493 - DNA, 21 bp, Artificial Sequence
  Description of Artificial Sequence: Synthetic oligonucleotide
actaggagtccttctagttat

SEQ ID NO: 26494 - DNA, 21 bp, Artificial Sequence
  Description of Artificial Sequence: Synthetic oligonucleotide
actcgttctcagcatgagtct

SEQ ID NO: 26495 - DNA, 21 bp, Artificial Sequence
  Description of Artificial Sequence: Synthetic oligonucleotide
acgaggtctcagagtcctatg

SEQ ID NO: 26496 - DNA, 21 bp, Artificial Sequence
  Description of Artificial Sequence: Synthetic oligonucleotide
acgcggagttcgttgacgccg

SEQ ID NO: 26497 - DNA, 21 bp, Artificial Sequence
  Description of Artificial Sequence: Synthetic oligonucleotide
actaggtcgtcgtcgattctg

SEQ ID NO: 26498 - DNA, 21 bp, Artificial Sequence
  Description of Artificial Sequence: Synthetic oligonucleotide
actcggagtacggcttctcct

SEQ ID NO: 26499 - DNA, 21 bp, Artificial Sequence
  Description of Artificial Sequence: Synthetic oligonucleotide
actaggagtacgcctatttat

SEQ ID NO: 26500 - DNA, 21 bp, Artificial Sequence
  Description of Artificial Sequence: Synthetic oligonucleotide
acgaggtcggtggagcttctt

SEQ ID NO: 26501 - DNA, 21 bp, Artificial Sequence
  Description of Artificial Sequence: Synthetic oligonucleotide
actaggactattacgccgctt

SEQ ID NO: 26502 - DNA, 21 bp, Artificial Sequence
  Description of Artificial Sequence: Synthetic oligonucleotide
acgcggactttgacttcgtcg

SEQ ID NO: 26503 - DNA, 21 bp, Artificial Sequence
  Description of Artificial Sequence: Synthetic oligonucleotide
actaggactatgtcgatgtct

SEQ ID NO: 26504 - DNA, 21 bp, Artificial Sequence
  Description of Artificial Sequence: Synthetic oligonucleotide
acgcggacgaatagtattatt

SEQ ID NO: 26505 - DNA, 21 bp, Artificial Sequence
  Description of Artificial Sequence: Synthetic oligonucleotide
acgcggacgcgtcttggggat

SEQ ID NO: 26506 - DNA, 21 bp, Artificial Sequence
  Description of Artificial Sequence: Synthetic oligonucleotide
acgcgtacgtcggattttcct

SEQ ID NO: 26507 - DNA, 21 bp, Artificial Sequence
  Description of Artificial Sequence: Synthetic oligonucleotide
actcggacgtctcatgctctt

SEQ ID NO: 26508 - DNA, 21 bp, Artificial Sequence
  Description of Artificial Sequence: Synthetic oligonucleotide
actcgtacgtcgcagcctagt

SEQ ID NO: 26509 - DNA, 21 bp, Artificial Sequence
  Description of Artificial Sequence: Synthetic oligonucleotide
actaggacttctactggttct

SEQ ID NO: 26510 - DNA, 21 bp, Artificial Sequence
  Description of Artificial Sequence: Synthetic oligonucleotide
acgcggactactgggtcgatg

SEQ ID NO: 26511 - DNA, 21 bp, Artificial Sequence
  Description of Artificial Sequence: Synthetic oligonucleotide
acgaggactacgttggagagt

SEQ ID NO: 26512 - DNA, 21 bp, Artificial Sequence
  Description of Artificial Sequence: Synthetic oligonucleotide
actcgtactacgacggttact

SEQ ID NO: 26513 - DNA, 21 bp, Artificial Sequence
  Description of Artificial Sequence: Synthetic oligonucleotide
actaggacggtggctacttat

SEQ ID NO: 26514 - DNA, 21 bp, Artificial Sequence
  Description of Artificial Sequence: Synthetic oligonucleotide
actcgtacggttcagctgggt

SEQ ID NO: 26515 - DNA, 21 bp, Artificial Sequence
  Description of Artificial Sequence: Synthetic oligonucleotide
actagggtgcatggtgttagt

SEQ ID NO: 26516 - DNA, 21 bp, Artificial Sequence
  Description of Artificial Sequence: Synthetic oligonucleotide
actagggttattatgaatgat

SEQ ID NO: 26517 - DNA, 21 bp, Artificial Sequence
  Description of Artificial Sequence: Synthetic oligonucleotide
acgagggtgagtagtattcct

SEQ ID NO: 26518 - DNA, 21 bp, Artificial Sequence
  Description of Artificial Sequence: Synthetic oligonucleotide
actcgtgttacggctcctttg

SEQ ID NO: 26519 - DNA, 21 bp, Artificial Sequence
  Description of Artificial Sequence: Synthetic oligonucleotide
acgcgtgtgtatccggcgggt

SEQ ID NO: 26520 - DNA, 21 bp, Artificial Sequence
  Description of Artificial Sequence: Synthetic oligonucleotide
acttctgctgggcttaattat

SEQ ID NO: 26521 - DNA, 21 bp, Artificial Sequence
  Description of Artificial Sequence: Synthetic oligonucleotide
acgtcggctggggtttataag

SEQ ID NO: 26522 - DNA, 21 bp, Artificial Sequence
  Description of Artificial Sequence: Synthetic oligonucleotide
acttctgcgaagcatacgatg

SEQ ID NO: 26523 - DNA, 21 bp, Artificial Sequence
  Description of Artificial Sequence: Synthetic oligonucleotide
acgtcggcgctgatttttgag

SEQ ID NO: 26524 - DNA, 21 bp, Artificial Sequence
  Description of Artificial Sequence: Synthetic oligonucleotide
actagtgctcagtctgggccg

SEQ ID NO: 26525 - DNA, 21 bp, Artificial Sequence
  Description of Artificial Sequence: Synthetic oligonucleotide
acttcggcgcgtccttttttg

SEQ ID NO: 26526 - DNA, 21 bp, Artificial Sequence
  Description of Artificial Sequence: Synthetic oligonucleotide
acgtctgcgaggcctgtgggg

SEQ ID NO: 26527 - DNA, 21 bp, Artificial Sequence
  Description of Artificial Sequence: Synthetic oligonucleotide
acttctgcgtctattcctccg

SEQ ID NO: 26528 - DNA, 21 bp, Artificial Sequence
  Description of Artificial Sequence: Synthetic oligonucleotide
acgtctgcgagttctactact

SEQ ID NO: 26529 - DNA, 21 bp, Artificial Sequence
  Description of Artificial Sequence: Synthetic oligonucleotide
acttcggatctgccgcttaat

SEQ ID NO: 26530 - DNA, 21 bp, Artificial Sequence
  Description of Artificial Sequence: Synthetic oligonucleotide
acgtctgatttgcgtgggcgt

SEQ ID NO: 26531 - DNA, 21 bp, Artificial Sequence
  Description of Artificial Sequence: Synthetic oligonucleotide
acgagtgataatatgcctcat

SEQ ID NO: 26532 - DNA, 21 bp, Artificial Sequence
  Description of Artificial Sequence: Synthetic oligonucleotide
acttcggatccgtgtatgagt

SEQ ID NO: 26533 - DNA, 21 bp, Artificial Sequence
  Description of Artificial Sequence: Synthetic oligonucleotide
actagtgattcggctgttacg

SEQ ID NO: 26534 - DNA, 21 bp, Artificial Sequence
  Description of Artificial Sequence: Synthetic oligonucleotide
acttctgatgtgcttcttacg

SEQ ID NO: 26535 - DNA, 21 bp, Artificial Sequence
  Description of Artificial Sequence: Synthetic oligonucleotide
actagtgagtctaaggcgcat

SEQ ID NO: 26536 - DNA, 21 bp, Artificial Sequence
  Description of Artificial Sequence: Synthetic oligonucleotide
acgagtgagtcttggccttct

SEQ ID NO: 26537 - DNA, 21 bp, Artificial Sequence
  Description of Artificial Sequence: Synthetic oligonucleotide
acttcttttggtccttcttcg

SEQ ID NO: 26538 - DNA, 21 bp, Artificial Sequence
  Description of Artificial Sequence: Synthetic oligonucleotide
acttcgtttctgaagacgtct

SEQ ID NO: 26539 - DNA, 21 bp, Artificial Sequence
  Description of Artificial Sequence: Synthetic oligonucleotide
actagttttccttcgtcggct

SEQ ID NO: 26540 - DNA, 21 bp, Artificial Sequence
  Description of Artificial Sequence: Synthetic oligonucleotide
acgagttttcggctggatgag

SEQ ID NO: 26541 - DNA, 21 bp, Artificial Sequence
  Description of Artificial Sequence: Synthetic oligonucleotide
acgtcgttttctcagtcgacg

SEQ ID NO: 26542 - DNA, 21 bp, Artificial Sequence
  Description of Artificial Sequence: Synthetic oligonucleotide
acgtcgttttcgcgtggtctg

SEQ ID NO: 26543 - DNA, 21 bp, Artificial Sequence
  Description of Artificial Sequence: Synthetic oligonucleotide
acgagtggtcatcatattctg

SEQ ID NO: 26544 - DNA, 21 bp, Artificial Sequence
  Description of Artificial Sequence: Synthetic oligonucleotide
acgtcggggctgcctgaggct

SEQ ID NO: 26545 - DNA, 21 bp, Artificial Sequence
  Description of Artificial Sequence: Synthetic oligonucleotide
acttctggtctgtcggaggtg

SEQ ID NO: 26546 - DNA, 21 bp, Artificial Sequence
  Description of Artificial Sequence: Synthetic oligonucleotide
acttctgggcttactcttggg

SEQ ID NO: 26547 - DNA, 21 bp, Artificial Sequence
  Description of Artificial Sequence: Synthetic oligonucleotide
acttcggggccgagtcatggg

SEQ ID NO: 26548 - DNA, 21 bp, Artificial Sequence
  Description of Artificial Sequence: Synthetic oligonucleotide
acttctgggcggtcgcctacg

SEQ ID NO: 26549 - DNA, 21 bp, Artificial Sequence
  Description of Artificial Sequence: Synthetic oligonucleotide
acgagtgggtcgcttaggcct

SEQ ID NO: 26550 - DNA, 21 bp, Artificial Sequence
  Description of Artificial Sequence: Synthetic oligonucleotide
actagtgggtcgactagtggt

SEQ ID NO: 26551 - DNA, 21 bp, Artificial Sequence
  Description of Artificial Sequence: Synthetic oligonucleotide
acgtctggtacgttgtcgact

SEQ ID NO: 26552 - DNA, 21 bp, Artificial Sequence
  Description of Artificial Sequence: Synthetic oligonucleotide
acgagtgggacgagtacggat

SEQ ID NO: 26553 - DNA, 21 bp, Artificial Sequence
  Description of Artificial Sequence: Synthetic oligonucleotide
actagtcatggtccggctact

SEQ ID NO: 26554 - DNA, 21 bp, Artificial Sequence
  Description of Artificial Sequence: Synthetic oligonucleotide
acgagtcataatgggttttct

SEQ ID NO: 26555 - DNA, 21 bp, Artificial Sequence
  Description of Artificial Sequence: Synthetic oligonucleotide
actagtcatcgtcctcagcct

SEQ ID NO: 26556 - DNA, 21 bp, Artificial Sequence
  Description of Artificial Sequence: Synthetic oligonucleotide
acttcgattgggcctaggatt

SEQ ID NO: 26557 - DNA, 21 bp, Artificial Sequence
  Description of Artificial Sequence: Synthetic oligonucleotide
acgtctattaatcgtttgcct

SEQ ID NO: 26558 - DNA, 21 bp, Artificial Sequence
  Description of Artificial Sequence: Synthetic oligonucleotide
acttcgaaggatggtcatcct

SEQ ID NO: 26559 - DNA, 21 bp, Artificial Sequence
  Description of Artificial Sequence: Synthetic oligonucleotide
acttctaagttgtcgtgtccg

SEQ ID NO: 26560 - DNA, 21 bp, Artificial Sequence
  Description of Artificial Sequence: Synthetic oligonucleotide
acgtcgaagacgccttctatt

SEQ ID NO: 26561 - DNA, 21 bp, Artificial Sequence
  Description of Artificial Sequence: Synthetic oligonucleotide
actagtaaggttgctacgatt

SEQ ID NO: 26562 - DNA, 21 bp, Artificial Sequence
  Description of Artificial Sequence: Synthetic oligonucleotide
acttctaagtggctgactccg

SEQ ID NO: 26563 - DNA, 21 bp, Artificial Sequence
  Description of Artificial Sequence: Synthetic oligonucleotide
acgtcgcttgatgctcggtct

SEQ ID NO: 26564 - DNA, 21 bp, Artificial Sequence
  Description of Artificial Sequence: Synthetic oligonucleotide
acttcgcttgggagtgtgtcg

SEQ ID NO: 26565 - DNA, 21 bp, Artificial Sequence
  Description of Artificial Sequence: Synthetic oligonucleotide
acgtcgcttcattctggtgat

SEQ ID NO: 26566 - DNA, 21 bp, Artificial Sequence
  Description of Artificial Sequence: Synthetic oligonucleotide
acgagtctgaataatcggttg

SEQ ID NO: 26567 - DNA, 21 bp, Artificial Sequence
  Description of Artificial Sequence: Synthetic oligonucleotide
acttcgttgcggattatgccg

SEQ ID NO: 26568 - DNA, 21 bp, Artificial Sequence
  Description of Artificial Sequence: Synthetic oligonucleotide
acttctcttcggatgaatggt

SEQ ID NO: 26569 - DNA, 21 bp, Artificial Sequence
  Description of Artificial Sequence: Synthetic oligonucleotide
acgtcgcttcggagtgatcct

SEQ ID NO: 26570 - DNA, 21 bp, Artificial Sequence
  Description of Artificial Sequence: Synthetic oligonucleotide
acttctttgtcgcttgctttg

SEQ ID NO: 26571 - DNA, 21 bp, Artificial Sequence
  Description of Artificial Sequence: Synthetic oligonucleotide
acgagtttgactcctgtttct

SEQ ID NO: 26572 - DNA, 21 bp, Artificial Sequence
  Description of Artificial Sequence: Synthetic oligonucleotide
acgtctttggtttttgctgtg

SEQ ID NO: 26573 - DNA, 21 bp, Artificial Sequence
  Description of Artificial Sequence: Synthetic oligonucleotide
acgtcgatgaatctgcctgat

SEQ ID NO: 26574 - DNA, 21 bp, Artificial Sequence
  Description of Artificial Sequence: Synthetic oligonucleotide
acgagtatgaggacggagttg

SEQ ID NO: 26575 - DNA, 21 bp, Artificial Sequence
  Description of Artificial Sequence: Synthetic oligonucleotide
acgtcgatgagtcctaggcat

SEQ ID NO: 26576 - DNA, 21 bp, Artificial Sequence
  Description of Artificial Sequence: Synthetic oligonucleotide
acttcgatgtctcctactacg

SEQ ID NO: 26577 - DNA, 21 bp, Artificial Sequence
  Description of Artificial Sequence: Synthetic oligonucleotide
acgtcgaatgctgttgattat

SEQ ID NO: 26578 - DNA, 21 bp, Artificial Sequence
  Description of Artificial Sequence: Synthetic oligonucleotide
acgtctaatggtcttaagctg

SEQ ID NO: 26579 - DNA, 21 bp, Artificial Sequence
  Description of Artificial Sequence: Synthetic oligonucleotide
actagtaatccgttgccgcgg

SEQ ID NO: 26580 - DNA, 21 bp, Artificial Sequence
  Description of Artificial Sequence: Synthetic oligonucleotide
actagtaatcagagtgctatg

SEQ ID NO: 26581 - DNA, 21 bp, Artificial Sequence
  Description of Artificial Sequence: Synthetic oligonucleotide
acgagtaatactagtatgagt

SEQ ID NO: 26582 - DNA, 21 bp, Artificial Sequence
  Description of Artificial Sequence: Synthetic oligonucleotide
acgtctaatgtgcgtccgtat

SEQ ID NO: 26583 - DNA, 21 bp, Artificial Sequence
  Description of Artificial Sequence: Synthetic oligonucleotide
acgagtaattatcattcgctg

SEQ ID NO: 26584 - DNA, 21 bp, Artificial Sequence
  Description of Artificial Sequence: Synthetic oligonucleotide
acttcgaattatttgcagacg

SEQ ID NO: 26585 - DNA, 21 bp, Artificial Sequence
  Description of Artificial Sequence: Synthetic oligonucleotide
actagtccggctaggtattct

SEQ ID NO: 26586 - DNA, 21 bp, Artificial Sequence
  Description of Artificial Sequence: Synthetic oligonucleotide
acgtctccggatttttcgttg

SEQ ID NO: 26587 - DNA, 21 bp, Artificial Sequence
  Description of Artificial Sequence: Synthetic oligonucleotide
acttctcctgatcctaataag

SEQ ID NO: 26588 - DNA, 21 bp, Artificial Sequence
  Description of Artificial Sequence: Synthetic oligonucleotide
acttctcctatgcatactatt

SEQ ID NO: 26589 - DNA, 21 bp, Artificial Sequence
  Description of Artificial Sequence: Synthetic oligonucleotide
acttcgcctcctttgagtact

SEQ ID NO: 26590 - DNA, 21 bp, Artificial Sequence
  Description of Artificial Sequence: Synthetic oligonucleotide
acgtcgccgacgggtccgacg

SEQ ID NO: 26591 - DNA, 21 bp, Artificial Sequence
  Description of Artificial Sequence: Synthetic oligonucleotide
actagtcctgtttctcatgtg

SEQ ID NO: 26592 - DNA, 21 bp, Artificial Sequence
  Description of Artificial Sequence: Synthetic oligonucleotide
actagtcaggctgttcatctg

SEQ ID NO: 26593 - DNA, 21 bp, Artificial Sequence
  Description of Artificial Sequence: Synthetic oligonucleotide
acttcgcagcataggcaggct

SEQ ID NO: 26594 - DNA, 21 bp, Artificial Sequence
  Description of Artificial Sequence: Synthetic oligonucleotide
acttcgcagattaatcgtcag

SEQ ID NO: 26595 - DNA, 21 bp, Artificial Sequence
  Description of Artificial Sequence: Synthetic oligonucleotide
acgtctcagcagctgccgcag

SEQ ID NO: 26596 - DNA, 21 bp, Artificial Sequence
  Description of Artificial Sequence: Synthetic oligonucleotide
acttcgcagcgtcctatgctt

SEQ ID NO: 26597 - DNA, 21 bp, Artificial Sequence
  Description of Artificial Sequence: Synthetic oligonucleotide
acttcgcagcggtatcagccg

SEQ ID NO: 26598 - DNA, 21 bp, Artificial Sequence
  Description of Artificial Sequence: Synthetic oligonucleotide
acgtcgcaggtgcggacgact

SEQ ID NO: 26599 - DNA, 21 bp, Artificial Sequence
  Description of Artificial Sequence: Synthetic oligonucleotide
acgtctagggcgcctgtgttg

SEQ ID NO: 26600 - DNA, 21 bp, Artificial Sequence
  Description of Artificial Sequence: Synthetic oligonucleotide
acgtctagggatcatgttcgt

SEQ ID NO: 26601 - DNA, 21 bp, Artificial Sequence
  Description of Artificial Sequence: Synthetic oligonucleotide
acttctcgggagacttatact

SEQ ID NO: 26602 - DNA, 21 bp, Artificial Sequence
  Description of Artificial Sequence: Synthetic oligonucleotide
acgtcgcgtaatgaggttgcg

SEQ ID NO: 26603 - DNA, 21 bp, Artificial Sequence
  Description of Artificial Sequence: Synthetic oligonucleotide
actagtcgtacgattactacg

SEQ ID NO: 26604 - DNA, 21 bp, Artificial Sequence
  Description of Artificial Sequence: Synthetic oligonucleotide
acgagtcgtactaatgatcct

SEQ ID NO: 26605 - DNA, 21 bp, Artificial Sequence
  Description of Artificial Sequence: Synthetic oligonucleotide
acttctagggttgatactagt

SEQ ID NO: 26606 - DNA, 21 bp, Artificial Sequence
  Description of Artificial Sequence: Synthetic oligonucleotide
actagttcggcgtctgctgtt

SEQ ID NO: 26607 - DNA, 21 bp, Artificial Sequence
  Description of Artificial Sequence: Synthetic oligonucleotide
actagttcggatgggttgggt

SEQ ID NO: 26608 - DNA, 21 bp, Artificial Sequence
  Description of Artificial Sequence: Synthetic oligonucleotide
acttcttctgggtttaaggtt

SEQ ID NO: 26609 - DNA, 21 bp, Artificial Sequence
  Description of Artificial Sequence: Synthetic oligonucleotide
acttcgtcgggtctgacgggt

SEQ ID NO: 26610 - DNA, 21 bp, Artificial Sequence
  Description of Artificial Sequence: Synthetic oligonucleotide
acgtcttctgggactaatcag

SEQ ID NO: 26611 - DNA, 21 bp, Artificial Sequence
  Description of Artificial Sequence: Synthetic oligonucleotide
acgagtagtcattcggatgtt

SEQ ID NO: 26612 - DNA, 21 bp, Artificial Sequence
  Description of Artificial Sequence: Synthetic oligonucleotide
acgagttctcatactgagcat

SEQ ID NO: 26613 - DNA, 21 bp, Artificial Sequence
  Description of Artificial Sequence: Synthetic oligonucleotide
acgagttcgttggctcatatt

SEQ ID NO: 26614 - DNA, 21 bp, Artificial Sequence
  Description of Artificial Sequence: Synthetic oligonucleotide
actagtagtctggctactcat

SEQ ID NO: 26615 - DNA, 21 bp, Artificial Sequence
  Description of Artificial Sequence: Synthetic oligonucleotide
acgagtagtttgaggttggat

SEQ ID NO: 26616 - DNA, 21 bp, Artificial Sequence
  Description of Artificial Sequence: Synthetic oligonucleotide
actagttctcttaggcctcct

SEQ ID NO: 26617 - DNA, 21 bp, Artificial Sequence
  Description of Artificial Sequence: Synthetic oligonucleotide
acttcgtcgaattatccgtcg

SEQ ID NO: 26618 - DNA, 21 bp, Artificial Sequence
  Description of Artificial Sequence: Synthetic oligonucleotide
acgtcgtctccggcgctgact

SEQ ID NO: 26619 - DNA, 21 bp, Artificial Sequence
  Description of Artificial Sequence: Synthetic oligonucleotide
acttcttcgccgcttcagggt

SEQ ID NO: 26620 - DNA, 21 bp, Artificial Sequence
  Description of Artificial Sequence: Synthetic oligonucleotide
actagttcgcagcattcgact

SEQ ID NO: 26621 - DNA, 21 bp, Artificial Sequence
  Description of Artificial Sequence: Synthetic oligonucleotide
acgtctagtcgggcttattcg

SEQ ID NO: 26622 - DNA, 21 bp, Artificial Sequence
  Description of Artificial Sequence: Synthetic oligonucleotide
acgtcttcgcgtcttcctttt

SEQ ID NO: 26623 - DNA, 21 bp, Artificial Sequence
  Description of Artificial Sequence: Synthetic oligonucleotide
acgtcttcgtcggcgcgtgat

SEQ ID NO: 26624 - DNA, 21 bp, Artificial Sequence
  Description of Artificial Sequence: Synthetic oligonucleotide
acttcgagttcggggcttact

SEQ ID NO: 26625 - DNA, 21 bp, Artificial Sequence
  Description of Artificial Sequence: Synthetic oligonucleotide
acgtcgagtagtaatagtcct

SEQ ID NO: 26626 - DNA, 21 bp, Artificial Sequence
  Description of Artificial Sequence: Synthetic oligonucleotide
acttcttcgacgatgtcgcct

SEQ ID NO: 26627 - DNA, 21 bp, Artificial Sequence
  Description of Artificial Sequence: Synthetic oligonucleotide
acgtcgtcgacttatgaggag

SEQ ID NO: 26628 - DNA, 21 bp, Artificial Sequence
  Description of Artificial Sequence: Synthetic oligonucleotide
actagtagtgttagttcgatt

SEQ ID NO: 26629 - DNA, 21 bp, Artificial Sequence
  Description of Artificial Sequence: Synthetic oligonucleotide
acgagtacggctgctcttcct

SEQ ID NO: 26630 - DNA, 21 bp, Artificial Sequence
  Description of Artificial Sequence: Synthetic oligonucleotide
acttcgacttttgaggggatg

SEQ ID NO: 26631 - DNA, 21 bp, Artificial Sequence
  Description of Artificial Sequence: Synthetic oligonucleotide
acgagtactggtcatacggtt

SEQ ID NO: 26632 - DNA, 21 bp, Artificial Sequence
  Description of Artificial Sequence: Synthetic oligonucleotide
acgtcgacgggtgtgcgtatg

SEQ ID NO: 26633 - DNA, 21 bp, Artificial Sequence
  Description of Artificial Sequence: Synthetic oligonucleotide
acgtcgactttgctgtctctt

SEQ ID NO: 26634 - DNA, 21 bp, Artificial Sequence
  Description of Artificial Sequence: Synthetic oligonucleotide
actagtacgaatagtcttgct

SEQ ID NO: 26635 - DNA, 21 bp, Artificial Sequence
  Description of Artificial Sequence: Synthetic oligonucleotide
acgtctacgtctatggctatt

SEQ ID NO: 26636 - DNA, 21 bp, Artificial Sequence
  Description of Artificial Sequence: Synthetic oligonucleotide
acgtctacttcgaatcggaat

SEQ ID NO: 26637 - DNA, 21 bp, Artificial Sequence
  Description of Artificial Sequence: Synthetic oligonucleotide
acttctactacgatgccgctt

SEQ ID NO: 26638 - DNA, 21 bp, Artificial Sequence
  Description of Artificial Sequence: Synthetic oligonucleotide
acttcgactacggttgggaat

SEQ ID NO: 26639 - DNA, 21 bp, Artificial Sequence
  Description of Artificial Sequence: Synthetic oligonucleotide
acttcgactgtgagtcctaag

SEQ ID NO: 26640 - DNA, 21 bp, Artificial Sequence
  Description of Artificial Sequence: Synthetic oligonucleotide
acttcggttgagcgttcttgg

SEQ ID NO: 26641 - DNA, 21 bp, Artificial Sequence
  Description of Artificial Sequence: Synthetic oligonucleotide
acgtctgtgggtgatcatttt

SEQ ID NO: 26642 - DNA, 21 bp, Artificial Sequence
  Description of Artificial Sequence: Synthetic oligonucleotide
acgtctgttggttggcagccg

SEQ ID NO: 26643 - DNA, 21 bp, Artificial Sequence
  Description of Artificial Sequence: Synthetic oligonucleotide
acgtcggtgaagtcggcgtcg

SEQ ID NO: 26644 - DNA, 21 bp, Artificial Sequence
  Description of Artificial Sequence: Synthetic oligonucleotide
actagtgtgcagccgccgcct

SEQ ID NO: 26645 - DNA, 21 bp, Artificial Sequence
  Description of Artificial Sequence: Synthetic oligonucleotide
acttcggtttcgcatgctggt

SEQ ID NO: 26646 - DNA, 21 bp, Artificial Sequence
  Description of Artificial Sequence: Synthetic oligonucleotide
actagtgttacgatgaaggtg

SEQ ID NO: 26647 - DNA, 21 bp, Artificial Sequence
  Description of Artificial Sequence: Synthetic oligonucleotide
acgtcggtgactactcattat

SEQ ID NO: 26648 - DNA, 21 bp, Artificial Sequence
  Description of Artificial Sequence: Synthetic oligonucleotide
acgtcgtggcagggtgctgtt

SEQ ID NO: 26649 - DNA, 21 bp, Artificial Sequence
  Description of Artificial Sequence: Synthetic oligonucleotide
acgagttatggtccgaaggtt

SEQ ID NO: 26650 - DNA, 21 bp, Artificial Sequence
  Description of Artificial Sequence: Synthetic oligonucleotide
actagttatcagcgtattgag

SEQ ID NO: 26651 - DNA, 21 bp, Artificial Sequence
  Description of Artificial Sequence: Synthetic oligonucleotide
actacggcggcgaaggtgggt

SEQ ID NO: 26652 - DNA, 21 bp, Artificial Sequence
  Description of Artificial Sequence: Synthetic oligonucleotide
actacggctgagtatactagg

SEQ ID NO: 26653 - DNA, 21 bp, Artificial Sequence
  Description of Artificial Sequence: Synthetic oligonucleotide
acgacggctttgcctcagttt

SEQ ID NO: 26654 - DNA, 21 bp, Artificial Sequence
  Description of Artificial Sequence: Synthetic oligonucleotide
acgactgctatgaggggtcct

SEQ ID NO: 26655 - DNA, 21 bp, Artificial Sequence
  Description of Artificial Sequence: Synthetic oligonucleotide
actacggctcgtcagtttcag

SEQ ID NO: 26656 - DNA, 21 bp, Artificial Sequence
  Description of Artificial Sequence: Synthetic oligonucleotide
actacggcggtttcgtctaag

SEQ ID NO: 26657 - DNA, 21 bp, Artificial Sequence
  Description of Artificial Sequence: Synthetic oligonucleotide
actactgatgctgcgaggcct

SEQ ID NO: 26658 - DNA, 21 bp, Artificial Sequence
  Description of Artificial Sequence: Synthetic oligonucleotide
acgacggattgttgtgctgct

SEQ ID NO: 26659 - DNA, 21 bp, Artificial Sequence
  Description of Artificial Sequence: Synthetic oligonucleotide
acgactgatgtttatgtgcgt

SEQ ID NO: 26660 - DNA, 21 bp, Artificial Sequence
  Description of Artificial Sequence: Synthetic oligonucleotide
actactgattatcctctgagt

SEQ ID NO: 26661 - DNA, 21 bp, Artificial Sequence
  Description of Artificial Sequence: Synthetic oligonucleotide
actacggagcatggttatgtt

SEQ ID NO: 26662 - DNA, 21 bp, Artificial Sequence
  Description of Artificial Sequence: Synthetic oligonucleotide
acgacttttcttcagaatggt

SEQ ID NO: 26663 - DNA, 21 bp, Artificial Sequence
  Description of Artificial Sequence: Synthetic oligonucleotide
actactggtgctattgatatt

SEQ ID NO: 26664 - DNA, 21 bp, Artificial Sequence
  Description of Artificial Sequence: Synthetic oligonucleotide
actacgggtcatctttctgtt

SEQ ID NO: 26665 - DNA, 21 bp, Artificial Sequence
  Description of Artificial Sequence: Synthetic oligonucleotide
actacgggtcatacgcttatt

SEQ ID NO: 26666 - DNA, 21 bp, Artificial Sequence
  Description of Artificial Sequence: Synthetic oligonucleotide
actactgggcttagtctgggt

SEQ ID NO: 26667 - DNA, 21 bp, Artificial Sequence
  Description of Artificial Sequence: Synthetic oligonucleotide
acgactgggaattctcttcct

SEQ ID NO: 26668 - DNA, 21 bp, Artificial Sequence
  Description of Artificial Sequence: Synthetic oligonucleotide
actactggtaatacgttgtct

SEQ ID NO: 26669 - DNA, 21 bp, Artificial Sequence
  Description of Artificial Sequence: Synthetic oligonucleotide
actactggttcgattcctcat

SEQ ID NO: 26670 - DNA, 21 bp, Artificial Sequence
  Description of Artificial Sequence: Synthetic oligonucleotide
actactcatgctcctctttcg

SEQ ID NO: 26671 - DNA, 21 bp, Artificial Sequence
  Description of Artificial Sequence: Synthetic oligonucleotide
actacgcatgcttcgtgtacg

SEQ ID NO: 26672 - DNA, 21 bp, Artificial Sequence
  Description of Artificial Sequence: Synthetic oligonucleotide
actactcatgatgtttatcgg

SEQ ID NO: 26673 - DNA, 21 bp, Artificial Sequence
  Description of Artificial Sequence: Synthetic oligonucleotide
actactcattcgacggcggcg

SEQ ID NO: 26674 - DNA, 21 bp, Artificial Sequence
  Description of Artificial Sequence: Synthetic oligonucleotide
actacgcatacgcagtatcgt

SEQ ID NO: 26675 - DNA, 21 bp, Artificial Sequence
  Description of Artificial Sequence: Synthetic oligonucleotide
actacgattcttggtcctatg

SEQ ID NO: 26676 - DNA, 21 bp, Artificial Sequence
  Description of Artificial Sequence: Synthetic oligonucleotide
acgacgaagattggtgatgat

SEQ ID NO: 26677 - DNA, 21 bp, Artificial Sequence
  Description of Artificial Sequence: Synthetic oligonucleotide
actactaagagtgctgatact

SEQ ID NO: 26678 - DNA, 21 bp, Artificial Sequence
  Description of Artificial Sequence: Synthetic oligonucleotide
acgacgaaggttggttctccg

SEQ ID NO: 26679 - DNA, 21 bp, Artificial Sequence
  Description of Artificial Sequence: Synthetic oligonucleotide
actacgttggatccttctttg

SEQ ID NO: 26680 - DNA, 21 bp, Artificial Sequence
  Description of Artificial Sequence: Synthetic oligonucleotide
actacgcttggtccgtcgcgt

SEQ ID NO: 26681 - DNA, 21 bp, Artificial Sequence
  Description of Artificial Sequence: Synthetic oligonucleotide
acgacgcttgggtctgctgtg

SEQ ID NO: 26682 - DNA, 21 bp, Artificial Sequence
  Description of Artificial Sequence: Synthetic oligonucleotide
acgacgttgagtgggggtact

SEQ ID NO: 26683 - DNA, 21 bp, Artificial Sequence
  Description of Artificial Sequence: Synthetic oligonucleotide
actactctgtcgccgaataag

SEQ ID NO: 26684 - DNA, 21 bp, Artificial Sequence
  Description of Artificial Sequence: Synthetic oligonucleotide
acgacgctgtctccgaggggt

SEQ ID NO: 26685 - DNA, 21 bp, Artificial Sequence
  Description of Artificial Sequence: Synthetic oligonucleotide
actacgttgtctagtctggct

SEQ ID NO: 26686 - DNA, 21 bp, Artificial Sequence
  Description of Artificial Sequence: Synthetic oligonucleotide
actactatggctcttggggcg

SEQ ID NO: 26687 - DNA, 21 bp, Artificial Sequence
  Description of Artificial Sequence: Synthetic oligonucleotide
acgactatgaagccggaggct

SEQ ID NO: 26688 - DNA, 21 bp, Artificial Sequence
  Description of Artificial Sequence: Synthetic oligonucleotide
actactatgactttggtttcg

SEQ ID NO: 26689 - DNA, 21 bp, Artificial Sequence
  Description of Artificial Sequence: Synthetic oligonucleotide
actacgatgtatacgactact

SEQ ID NO: 26690 - DNA, 21 bp, Artificial Sequence
  Description of Artificial Sequence: Synthetic oligonucleotide
acgactaatgctcagggtggt

SEQ ID NO: 26691 - DNA, 21 bp, Artificial Sequence
  Description of Artificial Sequence: Synthetic oligonucleotide
actacgaatattgtgcggcag

SEQ ID NO: 26692 - DNA, 21 bp, Artificial Sequence
  Description of Artificial Sequence: Synthetic oligonucleotide
actactaatttggctatgatg

SEQ ID NO: 26693 - DNA, 21 bp, Artificial Sequence
  Description of Artificial Sequence: Synthetic oligonucleotide
acgacgccgggttatgctccg

SEQ ID NO: 26694 - DNA, 21 bp, Artificial Sequence
  Description of Artificial Sequence: Synthetic oligonucleotide
acgacgcctattagggatggt

SEQ ID NO: 26695 - DNA, 21 bp, Artificial Sequence
  Description of Artificial Sequence: Synthetic oligonucleotide
actactcctttgacgaagggg

SEQ ID NO: 26696 - DNA, 21 bp, Artificial Sequence
  Description of Artificial Sequence: Synthetic oligonucleotide
actactcctccgatgcatctt

SEQ ID NO: 26697 - DNA, 21 bp, Artificial Sequence
  Description of Artificial Sequence: Synthetic oligonucleotide
actactcctcagctgaatttg

SEQ ID NO: 26698 - DNA, 21 bp, Artificial Sequence
  Description of Artificial Sequence: Synthetic oligonucleotide
acgacgcctaggttgttgtct

SEQ ID NO: 26699 - DNA, 21 bp, Artificial Sequence
  Description of Artificial Sequence: Synthetic oligonucleotide
acgactcctactgatggggcg

SEQ ID NO: 26700 - DNA, 21 bp, Artificial Sequence
  Description of Artificial Sequence: Synthetic oligonucleotide
acgacgccgacgaatcgtcct

SEQ ID NO: 26701 - DNA, 21 bp, Artificial Sequence
  Description of Artificial Sequence: Synthetic oligonucleotide
actacgcaggagcatctgccg

SEQ ID NO: 26702 - DNA, 21 bp, Artificial Sequence
  Description of Artificial Sequence: Synthetic oligonucleotide
acgacgcagaatgtgaatcag

SEQ ID NO: 26703 - DNA, 21 bp, Artificial Sequence
  Description of Artificial Sequence: Synthetic oligonucleotide
acgacgcagtctacttatgag

SEQ ID NO: 26704 - DNA, 21 bp, Artificial Sequence
  Description of Artificial Sequence: Synthetic oligonucleotide
acgacgcagacggctgagacg

SEQ ID NO: 26705 - DNA, 21 bp, Artificial Sequence
  Description of Artificial Sequence: Synthetic oligonucleotide
acgacgagggatcctccggct

SEQ ID NO: 26706 - DNA, 21 bp, Artificial Sequence
  Description of Artificial Sequence: Synthetic oligonucleotide
actacgaggggtgatgagcct

SEQ ID NO: 26707 - DNA, 21 bp, Artificial Sequence
  Description of Artificial Sequence: Synthetic oligonucleotide
acgactaggattgcggctgag

SEQ ID NO: 26708 - DNA, 21 bp, Artificial Sequence
  Description of Artificial Sequence: Synthetic oligonucleotide
acgactcggctggctcttgct

SEQ ID NO: 26709 - DNA, 21 bp, Artificial Sequence
  Description of Artificial Sequence: Synthetic oligonucleotide
actacgcggctggtgagtccg

SEQ ID NO: 26710 - DNA, 21 bp, Artificial Sequence
  Description of Artificial Sequence: Synthetic oligonucleotide
acgacgcgtcctccgcattat

SEQ ID NO: 26711 - DNA, 21 bp, Artificial Sequence
  Description of Artificial Sequence: Synthetic oligonucleotide
actacgcgtccgtctgagccg

SEQ ID NO: 26712 - DNA, 21 bp, Artificial Sequence
  Description of Artificial Sequence: Synthetic oligonucleotide
actacgaggcagtctgataat

SEQ ID NO: 26713 - DNA, 21 bp, Artificial Sequence
  Description of Artificial Sequence: Synthetic oligonucleotide
actactcgttcggctgcgtct

SEQ ID NO: 26714 - DNA, 21 bp, Artificial Sequence
  Description of Artificial Sequence: Synthetic oligonucleotide
actacgaggagtgagtctggt

SEQ ID NO: 26715 - DNA, 21 bp, Artificial Sequence
  Description of Artificial Sequence: Synthetic oligonucleotide
acgactcggtctgtgctgcag

SEQ ID NO: 26716 - DNA, 21 bp, Artificial Sequence
  Description of Artificial Sequence: Synthetic oligonucleotide
actactagggttgagatggct

SEQ ID NO: 26717 - DNA, 21 bp, Artificial Sequence
  Description of Artificial Sequence: Synthetic oligonucleotide
acgactcgggttgggttggtg

SEQ ID NO: 26718 - DNA, 21 bp, Artificial Sequence
  Description of Artificial Sequence: Synthetic oligonucleotide
actactagtgcggatcattct

SEQ ID NO: 26719 - DNA, 21 bp, Artificial Sequence
  Description of Artificial Sequence: Synthetic oligonucleotide
acgactagtgcgcgtgagctt

SEQ ID NO: 26720 - DNA, 21 bp, Artificial Sequence
  Description of Artificial Sequence: Synthetic oligonucleotide
acgacgtcgggtgatcgtctg

SEQ ID NO: 26721 - DNA, 21 bp, Artificial Sequence
  Description of Artificial Sequence: Synthetic oligonucleotide
acgacttctgggtttagtcct

SEQ ID NO: 26722 - DNA, 21 bp, Artificial Sequence
  Description of Artificial Sequence: Synthetic oligonucleotide
actacgtcgcatgctccgtct

SEQ ID NO: 26723 - DNA, 21 bp, Artificial Sequence
  Description of Artificial Sequence: Synthetic oligonucleotide
actactagtcatcctcttatg

SEQ ID NO: 26724 - DNA, 21 bp, Artificial Sequence
  Description of Artificial Sequence: Synthetic oligonucleotide
acgacgagtattgggtcggcg

SEQ ID NO: 26725 - DNA, 21 bp, Artificial Sequence
  Description of Artificial Sequence: Synthetic oligonucleotide
actacgtctctgggtcgtgtt

SEQ ID NO: 26726 - DNA, 21 bp, Artificial Sequence
  Description of Artificial Sequence: Synthetic oligonucleotide
actacgtctttgatggaggct

SEQ ID NO: 26727 - DNA, 21 bp, Artificial Sequence
  Description of Artificial Sequence: Synthetic oligonucleotide
acgacgagtaatgttcatact

SEQ ID NO: 26728 - DNA, 21 bp, Artificial Sequence
  Description of Artificial Sequence: Synthetic oligonucleotide
actacttctccgttgcgtact

SEQ ID NO: 26729 - DNA, 21 bp, Artificial Sequence
  Description of Artificial Sequence: Synthetic oligonucleotide
acgactagtccgcagaggtct

SEQ ID NO: 26730 - DNA, 21 bp, Artificial Sequence
  Description of Artificial Sequence: Synthetic oligonucleotide
acgacttcgcgtctgtctgct

SEQ ID NO: 26731 - DNA, 21 bp, Artificial Sequence
  Description of Artificial Sequence: Synthetic oligonucleotide
acgacttcgagtagtccgtct

SEQ ID NO: 26732 - DNA, 21 bp, Artificial Sequence
  Description of Artificial Sequence: Synthetic oligonucleotide
acgactactgctatgattgtg

SEQ ID NO: 26733 - DNA, 21 bp, Artificial Sequence
  Description of Artificial Sequence: Synthetic oligonucleotide
actactacggcgagttttgag

SEQ ID NO: 26734 - DNA, 21 bp, Artificial Sequence
  Description of Artificial Sequence: Synthetic oligonucleotide
acgactactgataagccgctt

SEQ ID NO: 26735 - DNA, 21 bp, Artificial Sequence
  Description of Artificial Sequence: Synthetic oligonucleotide
acgacgacggatgtggcgcgt

SEQ ID NO: 26736 - DNA, 21 bp, Artificial Sequence
  Description of Artificial Sequence: Synthetic oligonucleotide
acgactacggagaggactagg

SEQ ID NO: 26737 - DNA, 21 bp, Artificial Sequence
  Description of Artificial Sequence: Synthetic oligonucleotide
actacgacgaagcatgtgtat

SEQ ID NO: 26738 - DNA, 21 bp, Artificial Sequence
  Description of Artificial Sequence: Synthetic oligonucleotide
acgacgacgcctattactaat

SEQ ID NO: 26739 - DNA, 21 bp, Artificial Sequence
  Description of Artificial Sequence: Synthetic oligonucleotide
actacgactcgtgtgaatgcg

SEQ ID NO: 26740 - DNA, 21 bp, Artificial Sequence
  Description of Artificial Sequence: Synthetic oligonucleotide
acgactacggttccgattttt

SEQ ID NO: 26741 - DNA, 21 bp, Artificial Sequence
  Description of Artificial Sequence: Synthetic oligonucleotide
actactactgtgacttatctt

SEQ ID NO: 26742 - DNA, 21 bp, Artificial Sequence
  Description of Artificial Sequence: Synthetic oligonucleotide
actactgtggatgtggtgcat

SEQ ID NO: 26743 - DNA, 21 bp, Artificial Sequence
  Description of Artificial Sequence: Synthetic oligonucleotide
acgactgttcctgatagtgtt

SEQ ID NO: 26744 - DNA, 21 bp, Artificial Sequence
  Description of Artificial Sequence: Synthetic oligonucleotide
actactgttccgaatacgtcg

SEQ ID NO: 26745 - DNA, 21 bp, Artificial Sequence
  Description of Artificial Sequence: Synthetic oligonucleotide
acgactgtgagggttcatccg

SEQ ID NO: 26746 - DNA, 21 bp, Artificial Sequence
  Description of Artificial Sequence: Synthetic oligonucleotide
acgacggtggtgtcggatttg

SEQ ID NO: 26747 - DNA, 21 bp, Artificial Sequence
  Description of Artificial Sequence: Synthetic oligonucleotide
acgactgtggtttatactgcg

SEQ ID NO: 26748 - DNA, 21 bp, Artificial Sequence
  Description of Artificial Sequence: Synthetic oligonucleotide
acgacgtatcctattcatgct

SEQ ID NO: 26749 - DNA, 21 bp, Artificial Sequence
  Description of Artificial Sequence: Synthetic oligonucleotide
actacttattctaattcggct

SEQ ID NO: 26750 - DNA, 21 bp, Artificial Sequence
  Description of Artificial Sequence: Synthetic oligonucleotide
acggtggctgggaatattgcg

SEQ ID NO: 26751 - DNA, 21 bp, Artificial Sequence
  Description of Artificial Sequence: Synthetic oligonucleotide
actgttgctcataggattcct

SEQ ID NO: 26752 - DNA, 21 bp, Artificial Sequence
  Description of Artificial Sequence: Synthetic oligonucleotide
actgtggctattcatgagcct

SEQ ID NO: 26753 - DNA, 21 bp, Artificial Sequence
  Description of Artificial Sequence: Synthetic oligonucleotide
actgttgctccggatctgaat

SEQ ID NO: 26754 - DNA, 21 bp, Artificial Sequence
  Description of Artificial Sequence: Synthetic oligonucleotide
actgtttgtgtgtcgaggact

SEQ ID NO: 26755 - DNA, 21 bp, Artificial Sequence
  Description of Artificial Sequence: Synthetic oligonucleotide
acggtggatgagtgggctggg

SEQ ID NO: 26756 - DNA, 21 bp, Artificial Sequence
  Description of Artificial Sequence: Synthetic oligonucleotide
acggttgatggttcgcatcag

SEQ ID NO: 26757 - DNA, 21 bp, Artificial Sequence
  Description of Artificial Sequence: Synthetic oligonucleotide
acggttgattctagtggggtt

SEQ ID NO: 26758 - DNA, 21 bp, Artificial Sequence
  Description of Artificial Sequence: Synthetic oligonucleotide
acggttgatactaagcattct

SEQ ID NO: 26759 - DNA, 21 bp, Artificial Sequence
  Description of Artificial Sequence: Synthetic oligonucleotide
actgtggagggtgatcgtctt

SEQ ID NO: 26760 - DNA, 21 bp, Artificial Sequence
  Description of Artificial Sequence: Synthetic oligonucleotide
acggttttttcggagtctgag

SEQ ID NO: 26761 - DNA, 21 bp, Artificial Sequence
  Description of Artificial Sequence: Synthetic oligonucleotide
acggtgggtcatcttaatgtt

SEQ ID NO: 26762 - DNA, 21 bp, Artificial Sequence
  Description of Artificial Sequence: Synthetic oligonucleotide
actgttggtaattatcgtgat

SEQ ID NO: 26763 - DNA, 21 bp, Artificial Sequence
  Description of Artificial Sequence: Synthetic oligonucleotide
acggttggttctctttctgat

SEQ ID NO: 26764 - DNA, 21 bp, Artificial Sequence
  Description of Artificial Sequence: Synthetic oligonucleotide
acggtgggtacgctgatgttg

SEQ ID NO: 26765 - DNA, 21 bp, Artificial Sequence
  Description of Artificial Sequence: Synthetic oligonucleotide
acggttggtactccgccgact

SEQ ID NO: 26766 - DNA, 21 bp, Artificial Sequence
  Description of Artificial Sequence: Synthetic oligonucleotide
acggtgggtacgcgggctatg

SEQ ID NO: 26767 - DNA, 21 bp, Artificial Sequence
  Description of Artificial Sequence: Synthetic oligonucleotide
actgtgggggtggaggggtcg

SEQ ID NO: 26768 - DNA, 21 bp, Artificial Sequence
  Description of Artificial Sequence: Synthetic oligonucleotide
acggttggtgttaatgcttct

SEQ ID NO: 26769 - DNA, 21 bp, Artificial Sequence
  Description of Artificial Sequence: Synthetic oligonucleotide
acggttcattttagtcaggcg

SEQ ID NO: 26770 - DNA, 21 bp, Artificial Sequence
  Description of Artificial Sequence: Synthetic oligonucleotide
actgttcatattttgacgcct

SEQ ID NO: 26771 - DNA, 21 bp, Artificial Sequence
  Description of Artificial Sequence: Synthetic oligonucleotide
acggttcataatgttcagttt

SEQ ID NO: 26772 - DNA, 21 bp, Artificial Sequence
  Description of Artificial Sequence: Synthetic oligonucleotide
acggttcatcggcaggttgat

SEQ ID NO: 26773 - DNA, 21 bp, Artificial Sequence
  Description of Artificial Sequence: Synthetic oligonucleotide
actgtgcatacgtttagggag

SEQ ID NO: 26774 - DNA, 21 bp, Artificial Sequence
  Description of Artificial Sequence: Synthetic oligonucleotide
actgttaagatttctgagggg

SEQ ID NO: 26775 - DNA, 21 bp, Artificial Sequence
  Description of Artificial Sequence: Synthetic oligonucleotide
actgtgaagcagtctcaggtt

SEQ ID NO: 26776 - DNA, 21 bp, Artificial Sequence
  Description of Artificial Sequence: Synthetic oligonucleotide
actgttaaggtgagtaagccg

SEQ ID NO: 26777 - DNA, 21 bp, Artificial Sequence
  Description of Artificial Sequence: Synthetic oligonucleotide
acggtgcttgcggctaggggg

SEQ ID NO: 26778 - DNA, 21 bp, Artificial Sequence
  Description of Artificial Sequence: Synthetic oligonucleotide
acggtgctggcttcgcctgtg

SEQ ID NO: 26779 - DNA, 21 bp, Artificial Sequence
  Description of Artificial Sequence: Synthetic oligonucleotide
acggttcttgagtcgcagtcg

SEQ ID NO: 26780 - DNA, 21 bp, Artificial Sequence
  Description of Artificial Sequence: Synthetic oligonucleotide
actgttttgaagacttcgatt

SEQ ID NO: 26781 - DNA, 21 bp, Artificial Sequence
  Description of Artificial Sequence: Synthetic oligonucleotide
actgttatgcggactttggct

SEQ ID NO: 26782 - DNA, 21 bp, Artificial Sequence
  Description of Artificial Sequence: Synthetic oligonucleotide
actgtgatgcgtgttactggt

SEQ ID NO: 26783 - DNA, 21 bp, Artificial Sequence
  Description of Artificial Sequence: Synthetic oligonucleotide
acggttaatggtcttcgggct

SEQ ID NO: 26784 - DNA, 21 bp, Artificial Sequence
  Description of Artificial Sequence: Synthetic oligonucleotide
actgtgaatcatcagtcgttg

SEQ ID NO: 26785 - DNA, 21 bp, Artificial Sequence
  Description of Artificial Sequence: Synthetic oligonucleotide
actgttaatattgagactaat

SEQ ID NO: 26786 - DNA, 21 bp, Artificial Sequence
  Description of Artificial Sequence: Synthetic oligonucleotide
actgttaataaggtgtgtctg

SEQ ID NO: 26787 - DNA, 21 bp, Artificial Sequence
  Description of Artificial Sequence: Synthetic oligonucleotide
actgttaattataatgatatt

SEQ ID NO: 26788 - DNA, 21 bp, Artificial Sequence
  Description of Artificial Sequence: Synthetic oligonucleotide
actgtgcctgctgggcatgag

SEQ ID NO: 26789 - DNA, 21 bp, Artificial Sequence
  Description of Artificial Sequence: Synthetic oligonucleotide
actgttcctgcgcggacgatg

SEQ ID NO: 26790 - DNA, 21 bp, Artificial Sequence
  Description of Artificial Sequence: Synthetic oligonucleotide
actgtgcctcagagtgtgctt

SEQ ID NO: 26791 - DNA, 21 bp, Artificial Sequence
  Description of Artificial Sequence: Synthetic oligonucleotide
actgttccgactgcggttgct

SEQ ID NO: 26792 - DNA, 21 bp, Artificial Sequence
  Description of Artificial Sequence: Synthetic oligonucleotide
actgttccggttgcgattgtt

SEQ ID NO: 26793 - DNA, 21 bp, Artificial Sequence
  Description of Artificial Sequence: Synthetic oligonucleotide
acggtgcaggatacttttcgt

SEQ ID NO: 26794 - DNA, 21 bp, Artificial Sequence
  Description of Artificial Sequence: Synthetic oligonucleotide
acggtgcaggggattgatcgt

SEQ ID NO: 26795 - DNA, 21 bp, Artificial Sequence
  Description of Artificial Sequence: Synthetic oligonucleotide
actgttcagcagcaggcgaat

SEQ ID NO: 26796 - DNA, 21 bp, Artificial Sequence
  Description of Artificial Sequence: Synthetic oligonucleotide
actgttcagagtcctcttttg

SEQ ID NO: 26797 - DNA, 21 bp, Artificial Sequence
  Description of Artificial Sequence: Synthetic oligonucleotide
actgttcagtcgagtgcgact

SEQ ID NO: 26798 - DNA, 21 bp, Artificial Sequence
  Description of Artificial Sequence: Synthetic oligonucleotide
acggttcagactacgtctacg

SEQ ID NO: 26799 - DNA, 21 bp, Artificial Sequence
  Description of Artificial Sequence: Synthetic oligonucleotide
acggtgcaggtgcggctgcct

SEQ ID NO: 26800 - DNA, 21 bp, Artificial Sequence
  Description of Artificial Sequence: Synthetic oligonucleotide
acggttagggggatttcgttg

SEQ ID NO: 26801 - DNA, 21 bp, Artificial Sequence
  Description of Artificial Sequence: Synthetic oligonucleotide
actgttcgtgggttggatacg

SEQ ID NO: 26802 - DNA, 21 bp, Artificial Sequence
  Description of Artificial Sequence: Synthetic oligonucleotide
actgttcgtggtagtcctttg

SEQ ID NO: 26803 - DNA, 21 bp, Artificial Sequence
  Description of Artificial Sequence: Synthetic oligonucleotide
acggttcggctggatggggtt

SEQ ID NO: 26804 - DNA, 21 bp, Artificial Sequence
  Description of Artificial Sequence: Synthetic oligonucleotide
actgttcgtccggtttcttct

SEQ ID NO: 26805 - DNA, 21 bp, Artificial Sequence
  Description of Artificial Sequence: Synthetic oligonucleotide
actgtgcgttctccttcgatt

SEQ ID NO: 26806 - DNA, 21 bp, Artificial Sequence
  Description of Artificial Sequence: Synthetic oligonucleotide
actgtttctgctcagccgcgg

SEQ ID NO: 26807 - DNA, 21 bp, Artificial Sequence
  Description of Artificial Sequence: Synthetic oligonucleotide
actgtttctgatacttcgttt

SEQ ID NO: 26808 - DNA, 21 bp, Artificial Sequence
  Description of Artificial Sequence: Synthetic oligonucleotide
actgtgtctgggaagcatacg

SEQ ID NO: 26809 - DNA, 21 bp, Artificial Sequence
  Description of Artificial Sequence: Synthetic oligonucleotide
actgtgagtcatggtcagcgt

SEQ ID NO: 26810 - DNA, 21 bp, Artificial Sequence
  Description of Artificial Sequence: Synthetic oligonucleotide
acggtgtctaagatgggtggg

SEQ ID NO: 26811 - DNA, 21 bp, Artificial Sequence
  Description of Artificial Sequence: Synthetic oligonucleotide
acggtgtctcggaatgatgct

SEQ ID NO: 26812 - DNA, 21 bp, Artificial Sequence
  Description of Artificial Sequence: Synthetic oligonucleotide
actgttagtcggcaggtgtgt

SEQ ID NO: 26813 - DNA, 21 bp, Artificial Sequence
  Description of Artificial Sequence: Synthetic oligonucleotide
acggtgagtacgacttgtgct

SEQ ID NO: 26814 - DNA, 21 bp, Artificial Sequence
  Description of Artificial Sequence: Synthetic oligonucleotide
acggtgtcggtgactaagccg

SEQ ID NO: 26815 - DNA, 21 bp, Artificial Sequence
  Description of Artificial Sequence: Synthetic oligonucleotide
actgttagtgtggtggataag

SEQ ID NO: 26816 - DNA, 21 bp, Artificial Sequence
  Description of Artificial Sequence: Synthetic oligonucleotide
acggtgacggaggcgaggaat

SEQ ID NO: 26817 - DNA, 21 bp, Artificial Sequence
  Description of Artificial Sequence: Synthetic oligonucleotide
acggttacgggtaatggtttt

SEQ ID NO: 26818 - DNA, 21 bp, Artificial Sequence
  Description of Artificial Sequence: Synthetic oligonucleotide
acggtgactcataatatggag

SEQ ID NO: 26819 - DNA, 21 bp, Artificial Sequence
  Description of Artificial Sequence: Synthetic oligonucleotide
actgtgactaatccgcggaat

SEQ ID NO: 26820 - DNA, 21 bp, Artificial Sequence
  Description of Artificial Sequence: Synthetic oligonucleotide
actgtgacgcctgcggtgaat

SEQ ID NO: 26821 - DNA, 21 bp, Artificial Sequence
  Description of Artificial Sequence: Synthetic oligonucleotide
actgtgactcggcatccgtct

SEQ ID NO: 26822 - DNA, 21 bp, Artificial Sequence
  Description of Artificial Sequence: Synthetic oligonucleotide
acggtgactacggctgagcgt

SEQ ID NO: 26823 - DNA, 21 bp, Artificial Sequence
  Description of Artificial Sequence: Synthetic oligonucleotide
acggtgacgacgggtcggtgg

SEQ ID NO: 26824 - DNA, 21 bp, Artificial Sequence
  Description of Artificial Sequence: Synthetic oligonucleotide
acggtgactactcgtcaggcg

SEQ ID NO: 26825 - DNA, 21 bp, Artificial Sequence
  Description of Artificial Sequence: Synthetic oligonucleotide
acggttgtgaagtctggtgat

SEQ ID NO: 26826 - DNA, 21 bp, Artificial Sequence
  Description of Artificial Sequence: Synthetic oligonucleotide
acggttgttctgactagtggg

SEQ ID NO: 26827 - DNA, 21 bp, Artificial Sequence
  Description of Artificial Sequence: Synthetic oligonucleotide
actgttgtgccttctgggcgt

SEQ ID NO: 26828 - DNA, 21 bp, Artificial Sequence
  Description of Artificial Sequence: Synthetic oligonucleotide
acggtggtgccggttcctggg

SEQ ID NO: 26829 - DNA, 21 bp, Artificial Sequence
  Description of Artificial Sequence: Synthetic oligonucleotide
actgtgtattcgggtaggcct

SEQ ID NO: 26830 - DNA, 21 bp, Artificial Sequence
  Description of Artificial Sequence: Synthetic oligonucleotide
actgtttatagtcctaatact

SEQ ID NO: 26831 - DNA, 21 bp, Artificial Sequence
  Description of Artificial Sequence: Synthetic oligonucleotide
acttggaatgctactatgaat

SEQ ID NO: 26832 - DNA, 21 bp, Artificial Sequence
  Description of Artificial Sequence: Synthetic oligonucleotide
acgtggcaggataatagggct

SEQ ID NO: 26833 - DNA, 21 bp, Artificial Sequence
  Description of Artificial Sequence: Synthetic oligonucleotide
acgtggagtgcgactcagggg

SEQ ID NO: 26834 - DNA, 21 bp, Artificial Sequence
  Description of Artificial Sequence: Synthetic oligonucleotide
acttggagttcgggtacggat

SEQ ID NO: 26835 - DNA, 21 bp, Artificial Sequence
  Description of Artificial Sequence: Synthetic oligonucleotide
acgtggtctactaatgtgagt

SEQ ID NO: 26836 - DNA, 21 bp, Artificial Sequence
  Description of Artificial Sequence: Synthetic oligonucleotide
acttatgctattattccggat

SEQ ID NO: 26837 - DNA, 21 bp, Artificial Sequence
  Description of Artificial Sequence: Synthetic oligonucleotide
acttatgctaattcggcgttt

SEQ ID NO: 26838 - DNA, 21 bp, Artificial Sequence
  Description of Artificial Sequence: Synthetic oligonucleotide
acttatgctaatgtttctagt

SEQ ID NO: 26839 - DNA, 21 bp, Artificial Sequence
  Description of Artificial Sequence: Synthetic oligonucleotide
acgtatgctccttctcggggt

SEQ ID NO: 26840 - DNA, 21 bp, Artificial Sequence
  Description of Artificial Sequence: Synthetic oligonucleotide
acttatgcgccggtggagacg

SEQ ID NO: 26841 - DNA, 21 bp, Artificial Sequence
  Description of Artificial Sequence: Synthetic oligonucleotide
acttatgctcggtcgcaggcg

SEQ ID NO: 26842 - DNA, 21 bp, Artificial Sequence
  Description of Artificial Sequence: Synthetic oligonucleotide
acgtatgaggctaggcagctg

SEQ ID NO: 26843 - DNA, 21 bp, Artificial Sequence
  Description of Artificial Sequence: Synthetic oligonucleotide
acttatgagggtaggctgcgg

SEQ ID NO: 26844 - DNA, 21 bp, Artificial Sequence
  Description of Artificial Sequence: Synthetic oligonucleotide
acttatgagctttctccgcct

SEQ ID NO: 26845 - DNA, 21 bp, Artificial Sequence
  Description of Artificial Sequence: Synthetic oligonucleotide
acgtatgaggttcgtcagctt

SEQ ID NO: 26846 - DNA, 21 bp, Artificial Sequence
  Description of Artificial Sequence: Synthetic oligonucleotide
acgtatggggctgcggtgcag

SEQ ID NO: 26847 - DNA, 21 bp, Artificial Sequence
  Description of Artificial Sequence: Synthetic oligonucleotide
acgtatgggggtccgatgatt

SEQ ID NO: 26848 - DNA, 21 bp, Artificial Sequence
  Description of Artificial Sequence: Synthetic oligonucleotide
acgtatggtattcaggctcct

SEQ ID NO: 26849 - DNA, 21 bp, Artificial Sequence
  Description of Artificial Sequence: Synthetic oligonucleotide
acttatggtctttcggtgcct

SEQ ID NO: 26850 - DNA, 21 bp, Artificial Sequence
  Description of Artificial Sequence: Synthetic oligonucleotide
acttatggtatgacgggtgct

SEQ ID NO: 26851 - DNA, 21 bp, Artificial Sequence
  Description of Artificial Sequence: Synthetic oligonucleotide
acttatcatactggtgatggg

SEQ ID NO: 26852 - DNA, 21 bp, Artificial Sequence
  Description of Artificial Sequence: Synthetic oligonucleotide
acgtatattaatacgaatccg

SEQ ID NO: 26853 - DNA, 21 bp, Artificial Sequence
  Description of Artificial Sequence: Synthetic oligonucleotide
acttataaggatgagcagcct

SEQ ID NO: 26854 - DNA, 21 bp, Artificial Sequence
  Description of Artificial Sequence: Synthetic oligonucleotide
acttataagggtgctccgccg

SEQ ID NO: 26855 - DNA, 21 bp, Artificial Sequence
  Description of Artificial Sequence: Synthetic oligonucleotide
acttataagaatcagacgcat

SEQ ID NO: 26856 - DNA, 21 bp, Artificial Sequence
  Description of Artificial Sequence: Synthetic oligonucleotide
acgtatttgattgctacgccg

SEQ ID NO: 26857 - DNA, 21 bp, Artificial Sequence
  Description of Artificial Sequence: Synthetic oligonucleotide
acttatctgtctggggcttat

SEQ ID NO: 26858 - DNA, 21 bp, Artificial Sequence
  Description of Artificial Sequence: Synthetic oligonucleotide
acttatccgctgccgaatgag

SEQ ID NO: 26859 - DNA, 21 bp, Artificial Sequence
  Description of Artificial Sequence: Synthetic oligonucleotide
acgtatcctcctgcggctttg

SEQ ID NO: 26860 - DNA, 21 bp, Artificial Sequence
  Description of Artificial Sequence: Synthetic oligonucleotide
acttatccgacggagcctcgg

SEQ ID NO: 26861 - DNA, 21 bp, Artificial Sequence
  Description of Artificial Sequence: Synthetic oligonucleotide
acgtatcctacgttgcttgat

SEQ ID NO: 26862 - DNA, 21 bp, Artificial Sequence
  Description of Artificial Sequence: Synthetic oligonucleotide
acgtatcaggcttctcttatt

SEQ ID NO: 26863 - DNA, 21 bp, Artificial Sequence
  Description of Artificial Sequence: Synthetic oligonucleotide
acgtatcagtcgcagagtggg

SEQ ID NO: 26864 - DNA, 21 bp, Artificial Sequence
  Description of Artificial Sequence: Synthetic oligonucleotide
acttattctgcggagactatg

SEQ ID NO: 26865 - DNA, 21 bp, Artificial Sequence
  Description of Artificial Sequence: Synthetic oligonucleotide
acgtattctgcggtgctggct

SEQ ID NO: 26866 - DNA, 21 bp, Artificial Sequence
  Description of Artificial Sequence: Synthetic oligonucleotide
acgtattcgcatgctcgggct

SEQ ID NO: 26867 - DNA, 21 bp, Artificial Sequence
  Description of Artificial Sequence: Synthetic oligonucleotide
acgtattcgcctactgctacg

SEQ ID NO: 26868 - DNA, 21 bp, Artificial Sequence
  Description of Artificial Sequence: Synthetic oligonucleotide
acgtattctacggcgatttat

SEQ ID NO: 26869 - DNA, 21 bp, Artificial Sequence
  Description of Artificial Sequence: Synthetic oligonucleotide
acgtattctgtttcgcttgcg

SEQ ID NO: 26870 - DNA, 21 bp, Artificial Sequence
  Description of Artificial Sequence: Synthetic oligonucleotide
acgtatagttattcgagtgct

SEQ ID NO: 26871 - DNA, 21 bp, Artificial Sequence
  Description of Artificial Sequence: Synthetic oligonucleotide
acgtatactgggctggcggcg

SEQ ID NO: 26872 - DNA, 21 bp, Artificial Sequence
  Description of Artificial Sequence: Synthetic oligonucleotide
acgtatacgcatcatagtgtg

SEQ ID NO: 26873 - DNA, 21 bp, Artificial Sequence
  Description of Artificial Sequence: Synthetic oligonucleotide
acgtatacgtctacttatgct

SEQ ID NO: 26874 - DNA, 21 bp, Artificial Sequence
  Description of Artificial Sequence: Synthetic oligonucleotide
acttatgttgatgttcttcat

SEQ ID NO: 26875 - DNA, 21 bp, Artificial Sequence
  Description of Artificial Sequence: Synthetic oligonucleotide
acgtatgttggtaggggggcg

SEQ ID NO: 26876 - DNA, 21 bp, Artificial Sequence
  Description of Artificial Sequence: Synthetic oligonucleotide
acttatgtgatgactcctaag

SEQ ID NO: 26877 - DNA, 21 bp, Artificial Sequence
  Description of Artificial Sequence: Synthetic oligonucleotide
acttattatgcggctgagatt

SEQ ID NO: 26878 - DNA, 21 bp, Artificial Sequence
  Description of Artificial Sequence: Synthetic oligonucleotide
acttattataagaatacgggt

SEQ ID NO: 26879 - DNA, 21 bp, Artificial Sequence
  Description of Artificial Sequence: Synthetic oligonucleotide
gttgctgcggggcagtcgcct

SEQ ID NO: 26880 - DNA, 21 bp, Artificial Sequence
  Description of Artificial Sequence: Synthetic oligonucleotide
gtggcggcgcgttcggcgcag

SEQ ID NO: 26881 - DNA, 21 bp, Artificial Sequence
  Description of Artificial Sequence: Synthetic oligonucleotide
gttgcggatgcgacgaagcct

SEQ ID NO: 26882 - DNA, 21 bp, Artificial Sequence
  Description of Artificial Sequence: Synthetic oligonucleotide
gtggctgattttgttcgttgt

SEQ ID NO: 26883 - DNA, 21 bp, Artificial Sequence
  Description of Artificial Sequence: Synthetic oligonucleotide
gttgcggataaggcgttggtt

SEQ ID NO: 26884 - DNA, 21 bp, Artificial Sequence
  Description of Artificial Sequence: Synthetic oligonucleotide
gtggcggatctgcggccggag

SEQ ID NO: 26885 - DNA, 21 bp, Artificial Sequence
  Description of Artificial Sequence: Synthetic oligonucleotide
gttgctgatcctcctaggtcg

SEQ ID NO: 26886 - DNA, 21 bp, Artificial Sequence
  Description of Artificial Sequence: Synthetic oligonucleotide
gttgctgatcgtttgactact

SEQ ID NO: 26887 - DNA, 21 bp, Artificial Sequence
  Description of Artificial Sequence: Synthetic oligonucleotide
gttgctgagcatcctaagcgg

SEQ ID NO: 26888 - DNA, 21 bp, Artificial Sequence
  Description of Artificial Sequence: Synthetic oligonucleotide
gtggctgagcagcattctctg

SEQ ID NO: 26889 - DNA, 21 bp, Artificial Sequence
  Description of Artificial Sequence: Synthetic oligonucleotide
gttgctggggcgggtacgact

SEQ ID NO: 26890 - DNA, 21 bp, Artificial Sequence
  Description of Artificial Sequence: Synthetic oligonucleotide
gttgctggtgctcatgcgact

SEQ ID NO: 26891 - DNA, 21 bp, Artificial Sequence
  Description of Artificial Sequence: Synthetic oligonucleotide
gtggctggtgatgcgaagaat

SEQ ID NO: 26892 - DNA, 21 bp, Artificial Sequence
  Description of Artificial Sequence: Synthetic oligonucleotide
gttgcgggtattcggagtcag

SEQ ID NO: 26893 - DNA, 21 bp, Artificial Sequence
  Description of Artificial Sequence: Synthetic oligonucleotide
gttgctgggttgaatcatcgt

SEQ ID NO: 26894 - DNA, 21 bp, Artificial Sequence
  Description of Artificial Sequence: Synthetic oligonucleotide
gtggcggggccgactggtcct

SEQ ID NO: 26895 - DNA, 21 bp, Artificial Sequence
  Description of Artificial Sequence: Synthetic oligonucleotide
gtggctggtcagaggagtggt

SEQ ID NO: 26896 - DNA, 21 bp, Artificial Sequence
  Description of Artificial Sequence: Synthetic oligonucleotide
gtggcggggcagtcgcctcct

SEQ ID NO: 26897 - DNA, 21 bp, Artificial Sequence
  Description of Artificial Sequence: Synthetic oligonucleotide
gttgctgggcgggatcagccg

SEQ ID NO: 26898 - DNA, 21 bp, Artificial Sequence
  Description of Artificial Sequence: Synthetic oligonucleotide
gtggcggggcgtgatgtgcgg

SEQ ID NO: 26899 - DNA, 21 bp, Artificial Sequence
  Description of Artificial Sequence: Synthetic oligonucleotide
gttgcggggcgggattatcag

SEQ ID NO: 26900 - DNA, 21 bp, Artificial Sequence
  Description of Artificial Sequence: Synthetic oligonucleotide
gtggctgggagtgcgacggtt

SEQ ID NO: 26901 - DNA, 21 bp, Artificial Sequence
  Description of Artificial Sequence: Synthetic oligonucleotide
gttgctggtactgttgagcgt

SEQ ID NO: 26902 - DNA, 21 bp, Artificial Sequence
  Description of Artificial Sequence: Synthetic oligonucleotide
gtggcgggtgtgaggactgct

SEQ ID NO: 26903 - DNA, 21 bp, Artificial Sequence
  Description of Artificial Sequence: Synthetic oligonucleotide
gttgctggtgtttcggagatg

SEQ ID NO: 26904 - DNA, 21 bp, Artificial Sequence
  Description of Artificial Sequence: Synthetic oligonucleotide
gttgcgcatcttagtatgtcg

SEQ ID NO: 26905 - DNA, 21 bp, Artificial Sequence
  Description of Artificial Sequence: Synthetic oligonucleotide
gtggctcattcgttgcctgct

SEQ ID NO: 26906 - DNA, 21 bp, Artificial Sequence
  Description of Artificial Sequence: Synthetic oligonucleotide
gtggcgcattctactaatgct

SEQ ID NO: 26907 - DNA, 21 bp, Artificial Sequence
  Description of Artificial Sequence: Synthetic oligonucleotide
gttgctcatactggggctcgg

SEQ ID NO: 26908 - DNA, 21 bp, Artificial Sequence
  Description of Artificial Sequence: Synthetic oligonucleotide
gttgctcatacggtgtattcg

SEQ ID NO: 26909 - DNA, 21 bp, Artificial Sequence
  Description of Artificial Sequence: Synthetic oligonucleotide
gttgctcatgtgcagagtgat

SEQ ID NO: 26910 - DNA, 21 bp, Artificial Sequence
  Description of Artificial Sequence: Synthetic oligonucleotide
gttgcgcattatccggctagt

SEQ ID NO: 26911 - DNA, 21 bp, Artificial Sequence
  Description of Artificial Sequence: Synthetic oligonucleotide
gttgcgattcatggtgctgtt

SEQ ID NO: 26912 - DNA, 21 bp, Artificial Sequence
  Description of Artificial Sequence: Synthetic oligonucleotide
gttgcgattccgcgtgggtct

SEQ ID NO: 26913 - DNA, 21 bp, Artificial Sequence
  Description of Artificial Sequence: Synthetic oligonucleotide
gtggcgattcgtagtcctgct

SEQ ID NO: 26914 - DNA, 21 bp, Artificial Sequence
  Description of Artificial Sequence: Synthetic oligonucleotide
gtggcgcttgcggggcagtat

SEQ ID NO: 26915 - DNA, 21 bp, Artificial Sequence
  Description of Artificial Sequence: Synthetic oligonucleotide
gtggctctgcatcctttgaat

SEQ ID NO: 26916 - DNA, 21 bp, Artificial Sequence
  Description of Artificial Sequence: Synthetic oligonucleotide
gtggcgctgattaagtatagt

SEQ ID NO: 26917 - DNA, 21 bp, Artificial Sequence
  Description of Artificial Sequence: Synthetic oligonucleotide
gtggctttgtctgcggctaag

SEQ ID NO: 26918 - DNA, 21 bp, Artificial Sequence
  Description of Artificial Sequence: Synthetic oligonucleotide
gttgcgaatgagacgcattat

SEQ ID NO: 26919 - DNA, 21 bp, Artificial Sequence
  Description of Artificial Sequence: Synthetic oligonucleotide
gtggctaatggtaagtctcat

SEQ ID NO: 26920 - DNA, 21 bp, Artificial Sequence
  Description of Artificial Sequence: Synthetic oligonucleotide
gttgctaatcatattgaggtt

SEQ ID NO: 26921 - DNA, 21 bp, Artificial Sequence
  Description of Artificial Sequence: Synthetic oligonucleotide
gtggctaatcagcaggggacg

SEQ ID NO: 26922 - DNA, 21 bp, Artificial Sequence
  Description of Artificial Sequence: Synthetic oligonucleotide
gtggcgaatagggatgtgcag

SEQ ID NO: 26923 - DNA, 21 bp, Artificial Sequence
  Description of Artificial Sequence: Synthetic oligonucleotide
gttgctaatgtgcttacgaat

SEQ ID NO: 26924 - DNA, 21 bp, Artificial Sequence
  Description of Artificial Sequence: Synthetic oligonucleotide
gttgcgccggcgattcctggt

SEQ ID NO: 26925 - DNA, 21 bp, Artificial Sequence
  Description of Artificial Sequence: Synthetic oligonucleotide
gttgctcctattgggtctgag

SEQ ID NO: 26926 - DNA, 21 bp, Artificial Sequence
  Description of Artificial Sequence: Synthetic oligonucleotide
gttgcgccgcttattccgaag

SEQ ID NO: 26927 - DNA, 21 bp, Artificial Sequence
  Description of Artificial Sequence: Synthetic oligonucleotide
gttgctcctcctcctcagaag

SEQ ID NO: 26928 - DNA, 21 bp, Artificial Sequence
  Description of Artificial Sequence: Synthetic oligonucleotide
gttgctcctccgcctaggcat

SEQ ID NO: 26929 - DNA, 21 bp, Artificial Sequence
  Description of Artificial Sequence: Synthetic oligonucleotide
gttgcgccgccgtattctggt

SEQ ID NO: 26930 - DNA, 21 bp, Artificial Sequence
  Description of Artificial Sequence: Synthetic oligonucleotide
gtggcgccgtctgagggtagt

SEQ ID NO: 26931 - DNA, 21 bp, Artificial Sequence
  Description of Artificial Sequence: Synthetic oligonucleotide
gttgcgccgtcgcagcggttg

SEQ ID NO: 26932 - DNA, 21 bp, Artificial Sequence
  Description of Artificial Sequence: Synthetic oligonucleotide
gttgcgcagcgttcgggtccg

SEQ ID NO: 26933 - DNA, 21 bp, Artificial Sequence
  Description of Artificial Sequence: Synthetic oligonucleotide
gtggctcagagtcggagtatt

SEQ ID NO: 26934 - DNA, 21 bp, Artificial Sequence
  Description of Artificial Sequence: Synthetic oligonucleotide
gttgcgcgggctcatattgtg

SEQ ID NO: 26935 - DNA, 21 bp, Artificial Sequence
  Description of Artificial Sequence: Synthetic oligonucleotide
gttgcgagggggccgactact

SEQ ID NO: 26936 - DNA, 21 bp, Artificial Sequence
  Description of Artificial Sequence: Synthetic oligonucleotide
gtggcgaggcattctaatgag

SEQ ID NO: 26937 - DNA, 21 bp, Artificial Sequence
  Description of Artificial Sequence: Synthetic oligonucleotide
gttgctaggattgatgggatg

SEQ ID NO: 26938 - DNA, 21 bp, Artificial Sequence
  Description of Artificial Sequence: Synthetic oligonucleotide
gttgcgcggctgcctcaggtt

SEQ ID NO: 26939 - DNA, 21 bp, Artificial Sequence
  Description of Artificial Sequence: Synthetic oligonucleotide
gttgctcggccgctttcgatg

SEQ ID NO: 26940 - DNA, 21 bp, Artificial Sequence
  Description of Artificial Sequence: Synthetic oligonucleotide
gttgcgaggagtggtacgact

SEQ ID NO: 26941 - DNA, 21 bp, Artificial Sequence
  Description of Artificial Sequence: Synthetic oligonucleotide
gttgctaggtcgcttcaggct

SEQ ID NO: 26942 - DNA, 21 bp, Artificial Sequence
  Description of Artificial Sequence: Synthetic oligonucleotide
gtggcgcggtctaatttggat

SEQ ID NO: 26943 - DNA, 21 bp, Artificial Sequence
  Description of Artificial Sequence: Synthetic oligonucleotide
gttgcgtcggcgttgggtggt

SEQ ID NO: 26944 - DNA, 21 bp, Artificial Sequence
  Description of Artificial Sequence: Synthetic oligonucleotide
gtggcgagtgcgtcgccggcg

SEQ ID NO: 26945 - DNA, 21 bp, Artificial Sequence
  Description of Artificial Sequence: Synthetic oligonucleotide
gttgcgagtggtgtggttttt

SEQ ID NO: 26946 - DNA, 21 bp, Artificial Sequence
  Description of Artificial Sequence: Synthetic oligonucleotide
gtggcgtcgcatattactcct

SEQ ID NO: 26947 - DNA, 21 bp, Artificial Sequence
  Description of Artificial Sequence: Synthetic oligonucleotide
gttgcgtcgaagattattgat

SEQ ID NO: 26948 - DNA, 21 bp, Artificial Sequence
  Description of Artificial Sequence: Synthetic oligonucleotide
gtggcttcgttgcaggttggg

SEQ ID NO: 26949 - DNA, 21 bp, Artificial Sequence
  Description of Artificial Sequence: Synthetic oligonucleotide
gtggcttcgttgacgcatgat

SEQ ID NO: 26950 - DNA, 21 bp, Artificial Sequence
  Description of Artificial Sequence: Synthetic oligonucleotide
gttgctagtaataataaggcg

SEQ ID NO: 26951 - DNA, 21 bp, Artificial Sequence
  Description of Artificial Sequence: Synthetic oligonucleotide
gtggcttcgagggctcctact

SEQ ID NO: 26952 - DNA, 21 bp, Artificial Sequence
  Description of Artificial Sequence: Synthetic oligonucleotide
gtggctagttctaagactcct

SEQ ID NO: 26953 - DNA, 21 bp, Artificial Sequence
  Description of Artificial Sequence: Synthetic oligonucleotide
gttgctagttcttctgggatt

SEQ ID NO: 26954 - DNA, 21 bp, Artificial Sequence
  Description of Artificial Sequence: Synthetic oligonucleotide
gttgcgagtacggggtctccg

SEQ ID NO: 26955 - DNA, 21 bp, Artificial Sequence
  Description of Artificial Sequence: Synthetic oligonucleotide
gtggcttcggtgaagatgttg

SEQ ID NO: 26956 - DNA, 21 bp, Artificial Sequence
  Description of Artificial Sequence: Synthetic oligonucleotide
gtggcgtctgtgaggacgaat

SEQ ID NO: 26957 - DNA, 21 bp, Artificial Sequence
  Description of Artificial Sequence: Synthetic oligonucleotide
gttgcttcttattcgggtttt

SEQ ID NO: 26958 - DNA, 21 bp, Artificial Sequence
  Description of Artificial Sequence: Synthetic oligonucleotide
gtggctagttattcgcgggag

SEQ ID NO: 26959 - DNA, 21 bp, Artificial Sequence
  Description of Artificial Sequence: Synthetic oligonucleotide
gttgcgactgcttctgttacg

SEQ ID NO: 26960 - DNA, 21 bp, Artificial Sequence
  Description of Artificial Sequence: Synthetic oligonucleotide
gttgcgacggagctggctggg

SEQ ID NO: 26961 - DNA, 21 bp, Artificial Sequence
  Description of Artificial Sequence: Synthetic oligonucleotide
gtggctactctgaattatgtt

SEQ ID NO: 26962 - DNA, 21 bp, Artificial Sequence
  Description of Artificial Sequence: Synthetic oligonucleotide
gttgcgacgctgcgtggtaat

SEQ ID NO: 26963 - DNA, 21 bp, Artificial Sequence
  Description of Artificial Sequence: Synthetic oligonucleotide
gttgctactatggttgtgccg

SEQ ID NO: 26964 - DNA, 21 bp, Artificial Sequence
  Description of Artificial Sequence: Synthetic oligonucleotide
gtggctactaataatgatgtg

SEQ ID NO: 26965 - DNA, 21 bp, Artificial Sequence
  Description of Artificial Sequence: Synthetic oligonucleotide
gttgcgacgaatagtatttct

SEQ ID NO: 26966 - DNA, 21 bp, Artificial Sequence
  Description of Artificial Sequence: Synthetic oligonucleotide
gttgctactaatacgtatctt

SEQ ID NO: 26967 - DNA, 21 bp, Artificial Sequence
  Description of Artificial Sequence: Synthetic oligonucleotide
gttgctactccgacggttttg

SEQ ID NO: 26968 - DNA, 21 bp, Artificial Sequence
  Description of Artificial Sequence: Synthetic oligonucleotide
gtggcgacgcgggattcgtat

SEQ ID NO: 26969 - DNA, 21 bp, Artificial Sequence
  Description of Artificial Sequence: Synthetic oligonucleotide
gttgcgacgcgggttgtggag

SEQ ID NO: 26970 - DNA, 21 bp, Artificial Sequence
  Description of Artificial Sequence: Synthetic oligonucleotide
gtggcgacgtctgttcggccg

SEQ ID NO: 26971 - DNA, 21 bp, Artificial Sequence
  Description of Artificial Sequence: Synthetic oligonucleotide
gttgctgtgatgatgccttcg

SEQ ID NO: 26972 - DNA, 21 bp, Artificial Sequence
  Description of Artificial Sequence: Synthetic oligonucleotide
gttgctgttaattctcgtagt

SEQ ID NO: 26973 - DNA, 21 bp, Artificial Sequence
  Description of Artificial Sequence: Synthetic oligonucleotide
gttgcggttaggacgtctgat

SEQ ID NO: 26974 - DNA, 21 bp, Artificial Sequence
  Description of Artificial Sequence: Synthetic oligonucleotide
gttgctgtgtcggcgcctctt

SEQ ID NO: 26975 - DNA, 21 bp, Artificial Sequence
  Description of Artificial Sequence: Synthetic oligonucleotide
gtggctgtgagtactgttacg

SEQ ID NO: 26976 - DNA, 21 bp, Artificial Sequence
  Description of Artificial Sequence: Synthetic oligonucleotide
gtggcttatgatactgcggtg

SEQ ID NO: 26977 - DNA, 21 bp, Artificial Sequence
  Description of Artificial Sequence: Synthetic oligonucleotide
gttgcttatccggctcgtagt

SEQ ID NO: 26978 - DNA, 21 bp, Artificial Sequence
  Description of Artificial Sequence: Synthetic oligonucleotide
gtttgtggtcctccttttcat

SEQ ID NO: 26979 - DNA, 21 bp, Artificial Sequence
  Description of Artificial Sequence: Synthetic oligonucleotide
gtttgtaatagtgttggttat

SEQ ID NO: 26980 - DNA, 21 bp, Artificial Sequence
  Description of Artificial Sequence: Synthetic oligonucleotide
gttgatgcgaaggcgaatgat

SEQ ID NO: 26981 - DNA, 21 bp, Artificial Sequence
  Description of Artificial Sequence: Synthetic oligonucleotide
gtggatgattttcctaggtgt

SEQ ID NO: 26982 - DNA, 21 bp, Artificial Sequence
  Description of Artificial Sequence: Synthetic oligonucleotide
gttgatgatttgcgggctcgg

SEQ ID NO: 26983 - DNA, 21 bp, Artificial Sequence
  Description of Artificial Sequence: Synthetic oligonucleotide
gttgatgagattcgtcgtccg

SEQ ID NO: 26984 - DNA, 21 bp, Artificial Sequence
  Description of Artificial Sequence: Synthetic oligonucleotide
gttgattttgagcattctcag

SEQ ID NO: 26985 - DNA, 21 bp, Artificial Sequence
  Description of Artificial Sequence: Synthetic oligonucleotide
gttgatggtgcgcggcagcct

SEQ ID NO: 26986 - DNA, 21 bp, Artificial Sequence
  Description of Artificial Sequence: Synthetic oligonucleotide
gtggatggtctgggttctaag

SEQ ID NO: 26987 - DNA, 21 bp, Artificial Sequence
  Description of Artificial Sequence: Synthetic oligonucleotide
gtggatggtgtgcgtggggct

SEQ ID NO: 26988 - DNA, 21 bp, Artificial Sequence
  Description of Artificial Sequence: Synthetic oligonucleotide
gtggataagctttctcatact

SEQ ID NO: 26989 - DNA, 21 bp, Artificial Sequence
  Description of Artificial Sequence: Synthetic oligonucleotide
gtggataagcctcatcttgcg

SEQ ID NO: 26990 - DNA, 21 bp, Artificial Sequence
  Description of Artificial Sequence: Synthetic oligonucleotide
gttgatctgcagtgtgcgccg

SEQ ID NO: 26991 - DNA, 21 bp, Artificial Sequence
  Description of Artificial Sequence: Synthetic oligonucleotide
gttgatcttcggccttatgcg

SEQ ID NO: 26992 - DNA, 21 bp, Artificial Sequence
  Description of Artificial Sequence: Synthetic oligonucleotide
gtggataatgctgcgcagagt

SEQ ID NO: 26993 - DNA, 21 bp, Artificial Sequence
  Description of Artificial Sequence: Synthetic oligonucleotide
gtggataatcttgctcgtgct

SEQ ID NO: 26994 - DNA, 21 bp, Artificial Sequence
  Description of Artificial Sequence: Synthetic oligonucleotide
gtggataatactttgactgat

SEQ ID NO: 26995 - DNA, 21 bp, Artificial Sequence
  Description of Artificial Sequence: Synthetic oligonucleotide
gttgatcctgggcgtcatcat

SEQ ID NO: 26996 - DNA, 21 bp, Artificial Sequence
  Description of Artificial Sequence: Synthetic oligonucleotide
gttgatccgatgcctgctctt

SEQ ID NO: 26997 - DNA, 21 bp, Artificial Sequence
  Description of Artificial Sequence: Synthetic oligonucleotide
gtggatccgcggtggcatccg

SEQ ID NO: 26998 - DNA, 21 bp, Artificial Sequence
  Description of Artificial Sequence: Synthetic oligonucleotide
gtggatcagcatactattgcg

SEQ ID NO: 26999 - DNA, 21 bp, Artificial Sequence
  Description of Artificial Sequence: Synthetic oligonucleotide
gttgatcaggtgaataatccg

SEQ ID NO: 27000 - DNA, 21 bp, Artificial Sequence
  Description of Artificial Sequence: Synthetic oligonucleotide
gtggataggcatcattcgccg

SEQ ID NO: 27001 - DNA, 21 bp, Artificial Sequence
  Description of Artificial Sequence: Synthetic oligonucleotide
gtggatcgtaggcctgattcg

SEQ ID NO: 27002 - DNA, 21 bp, Artificial Sequence
  Description of Artificial Sequence: Synthetic oligonucleotide
gtggataggcggactacgacg

SEQ ID NO: 27003 - DNA, 21 bp, Artificial Sequence
  Description of Artificial Sequence: Synthetic oligonucleotide
gtggattctttgacgccgtat

SEQ ID NO: 27004 - DNA, 21 bp, Artificial Sequence
  Description of Artificial Sequence: Synthetic oligonucleotide
gtggattctccgtcggctcct

SEQ ID NO: 27005 - DNA, 21 bp, Artificial Sequence
  Description of Artificial Sequence: Synthetic oligonucleotide
gtggatagttcgactaatctg

SEQ ID NO: 27006 - DNA, 21 bp, Artificial Sequence
  Description of Artificial Sequence: Synthetic oligonucleotide
gttgatactcttatgaatcgt

SEQ ID NO: 27007 - DNA, 21 bp, Artificial Sequence
  Description of Artificial Sequence: Synthetic oligonucleotide
gttgatactcctgggaatagg

SEQ ID NO: 27008 - DNA, 21 bp, Artificial Sequence
  Description of Artificial Sequence: Synthetic oligonucleotide
gttgatacgaggagggagtct

SEQ ID NO: 27009 - DNA, 21 bp, Artificial Sequence
  Description of Artificial Sequence: Synthetic oligonucleotide
gttgatacttcgctggagtgt

SEQ ID NO: 27010 - DNA, 21 bp, Artificial Sequence
  Description of Artificial Sequence: Synthetic oligonucleotide
gtggatactacgaagtttcag

SEQ ID NO: 27011 - DNA, 21 bp, Artificial Sequence
  Description of Artificial Sequence: Synthetic oligonucleotide
gttgatgttcgtaagcatcct

SEQ ID NO: 27012 - DNA, 21 bp, Artificial Sequence
  Description of Artificial Sequence: Synthetic oligonucleotide
gttgattatgcggttagtatg

SEQ ID NO: 27013 - DNA, 21 bp, Artificial Sequence
  Description of Artificial Sequence: Synthetic oligonucleotide
gtggaggcgacgagtcgggtg

SEQ ID NO: 27014 - DNA, 21 bp, Artificial Sequence
  Description of Artificial Sequence: Synthetic oligonucleotide
gttgagggggtgcggtctgcg

SEQ ID NO: 27015 - DNA, 21 bp, Artificial Sequence
  Description of Artificial Sequence: Synthetic oligonucleotide
gtggagcataattcgcttaat

SEQ ID NO: 27016 - DNA, 21 bp, Artificial Sequence
  Description of Artificial Sequence: Synthetic oligonucleotide
gttgagcataatactcctttt

SEQ ID NO: 27017 - DNA, 21 bp, Artificial Sequence
  Description of Artificial Sequence: Synthetic oligonucleotide
gtggagcatagggttagtact

SEQ ID NO: 27018 - DNA, 21 bp, Artificial Sequence
  Description of Artificial Sequence: Synthetic oligonucleotide
gttgagcattctactaatgtt

SEQ ID NO: 27019 - DNA, 21 bp, Artificial Sequence
  Description of Artificial Sequence: Synthetic oligonucleotide
gttgagattaagactcgtagt

SEQ ID NO: 27020 - DNA, 21 bp, Artificial Sequence
  Description of Artificial Sequence: Synthetic oligonucleotide
gttgagatttcgtctgtgtcg

SEQ ID NO: 27021 - DNA, 21 bp, Artificial Sequence
  Description of Artificial Sequence: Synthetic oligonucleotide
gttgagaaggagatgaattcg

SEQ ID NO: 27022 - DNA, 21 bp, Artificial Sequence
  Description of Artificial Sequence: Synthetic oligonucleotide
gtggagaagacgccgatggag

SEQ ID NO: 27023 - DNA, 21 bp, Artificial Sequence
  Description of Artificial Sequence: Synthetic oligonucleotide
gttgagaaggtttctatgttg

SEQ ID NO: 27024 - DNA, 21 bp, Artificial Sequence
  Description of Artificial Sequence: Synthetic oligonucleotide
gttgagaagtataagaatttg

SEQ ID NO: 27025 - DNA, 21 bp, Artificial Sequence
  Description of Artificial Sequence: Synthetic oligonucleotide
gttgagttgaatcagggtgat

SEQ ID NO: 27026 - DNA, 21 bp, Artificial Sequence
  Description of Artificial Sequence: Synthetic oligonucleotide
gtggagaatgctaggcctcag

SEQ ID NO: 27027 - DNA, 21 bp, Artificial Sequence
  Description of Artificial Sequence: Synthetic oligonucleotide
gtggagccggcgtttactgat

SEQ ID NO: 27028 - DNA, 21 bp, Artificial Sequence
  Description of Artificial Sequence: Synthetic oligonucleotide
gtggagccgaggaagtcggct

SEQ ID NO: 27029 - DNA, 21 bp, Artificial Sequence
  Description of Artificial Sequence: Synthetic oligonucleotide
gttgagccgcggtcgatgtat

SEQ ID NO: 27030 - DNA, 21 bp, Artificial Sequence
  Description of Artificial Sequence: Synthetic oligonucleotide
gttgagcctactttgacgcgt

SEQ ID NO: 27031 - DNA, 21 bp, Artificial Sequence
  Description of Artificial Sequence: Synthetic oligonucleotide
gtggagcctgttctgcatacg

SEQ ID NO: 27032 - DNA, 21 bp, Artificial Sequence
  Description of Artificial Sequence: Synthetic oligonucleotide
gttgagcgggatgatcggacg

SEQ ID NO: 27033 - DNA, 21 bp, Artificial Sequence
  Description of Artificial Sequence: Synthetic oligonucleotide
gtggagcgtgatattgattct

SEQ ID NO: 27034 - DNA, 21 bp, Artificial Sequence
  Description of Artificial Sequence: Synthetic oligonucleotide
gttgagaggcctgtgaataag

SEQ ID NO: 27035 - DNA, 21 bp, Artificial Sequence
  Description of Artificial Sequence: Synthetic oligonucleotide
gttgagcgtgttaggacgctt

SEQ ID NO: 27036 - DNA, 21 bp, Artificial Sequence
  Description of Artificial Sequence: Synthetic oligonucleotide
gttgagtctgatacgtcgtgg

SEQ ID NO: 27037 - DNA, 21 bp, Artificial Sequence
  Description of Artificial Sequence: Synthetic oligonucleotide
gttgagtcgaattcgcctatg

SEQ ID NO: 27038 - DNA, 21 bp, Artificial Sequence
  Description of Artificial Sequence: Synthetic oligonucleotide
gttgagtcgaatagttctttt

SEQ ID NO: 27039 - DNA, 21 bp, Artificial Sequence
  Description of Artificial Sequence: Synthetic oligonucleotide
gttgagagtagtcctttgccg

SEQ ID NO: 27040 - DNA, 21 bp, Artificial Sequence
  Description of Artificial Sequence: Synthetic oligonucleotide
gttgagacggggcataataag

SEQ ID NO: 27041 - DNA, 21 bp, Artificial Sequence
  Description of Artificial Sequence: Synthetic oligonucleotide
gtggagacgaatcggaatcgt

SEQ ID NO: 27042 - DNA, 21 bp, Artificial Sequence
  Description of Artificial Sequence: Synthetic oligonucleotide
gttgagactaatgtgaagttg

SEQ ID NO: 27043 - DNA, 21 bp, Artificial Sequence
  Description of Artificial Sequence: Synthetic oligonucleotide
gtggagactccgttgcgtaag

SEQ ID NO: 27044 - DNA, 21 bp, Artificial Sequence
  Description of Artificial Sequence: Synthetic oligonucleotide
gttgaggtgaatacgctgcat

SEQ ID NO: 27045 - DNA, 21 bp, Artificial Sequence
  Description of Artificial Sequence: Synthetic oligonucleotide
gtgtttgataatactgtgcgt

SEQ ID NO: 27046 - DNA, 21 bp, Artificial Sequence
  Description of Artificial Sequence: Synthetic oligonucleotide
gtttttggtgctaatgtggcg

SEQ ID NO: 27047 - DNA, 21 bp, Artificial Sequence
  Description of Artificial Sequence: Synthetic oligonucleotide
gtttttggggatacgttgttg

SEQ ID NO: 27048 - DNA, 21 bp, Artificial Sequence
  Description of Artificial Sequence: Synthetic oligonucleotide
gtgtttgggattccgtcgccg

SEQ ID NO: 27049 - DNA, 21 bp, Artificial Sequence
  Description of Artificial Sequence: Synthetic oligonucleotide
gtttttcataaggggtttgat

SEQ ID NO: 27050 - DNA, 21 bp, Artificial Sequence
  Description of Artificial Sequence: Synthetic oligonucleotide
gtgtttcataagtctgagact

SEQ ID NO: 27051 - DNA, 21 bp, Artificial Sequence
  Description of Artificial Sequence: Synthetic oligonucleotide
gtttttcatactccggagcct

SEQ ID NO: 27052 - DNA, 21 bp, Artificial Sequence
  Description of Artificial Sequence: Synthetic oligonucleotide
gtttttttggagcctagttct

SEQ ID NO: 27053 - DNA, 21 bp, Artificial Sequence
  Description of Artificial Sequence: Synthetic oligonucleotide
gtttttccgcagtctacgccg

SEQ ID NO: 27054 - DNA, 21 bp, Artificial Sequence
  Description of Artificial Sequence: Synthetic oligonucleotide
gtgtttcaggatagtattccg

SEQ ID NO: 27055 - DNA, 21 bp, Artificial Sequence
  Description of Artificial Sequence: Synthetic oligonucleotide
gtgtttcaggggcagattgtg

SEQ ID NO: 27056 - DNA, 21 bp, Artificial Sequence
  Description of Artificial Sequence: Synthetic oligonucleotide
gtgtttcagactaataatgct

SEQ ID NO: 27057 - DNA, 21 bp, Artificial Sequence
  Description of Artificial Sequence: Synthetic oligonucleotide
gtttttcgtactacttcgcct

SEQ ID NO: 27058 - DNA, 21 bp, Artificial Sequence
  Description of Artificial Sequence: Synthetic oligonucleotide
gtttttagtgggcgtcaggcg

SEQ ID NO: 27059 - DNA, 21 bp, Artificial Sequence
  Description of Artificial Sequence: Synthetic oligonucleotide
gtgttttcgaattctgctgtt

SEQ ID NO: 27060 - DNA, 21 bp, Artificial Sequence
  Description of Artificial Sequence: Synthetic oligonucleotide
gtgtttactcatgagcggacg

SEQ ID NO: 27061 - DNA, 21 bp, Artificial Sequence
  Description of Artificial Sequence: Synthetic oligonucleotide
gtttttacgcattctgatcct

SEQ ID NO: 27062 - DNA, 21 bp, Artificial Sequence
  Description of Artificial Sequence: Synthetic oligonucleotide
gtttttacgaatccgcgtttg

SEQ ID NO: 27063 - DNA, 21 bp, Artificial Sequence
  Description of Artificial Sequence: Synthetic oligonucleotide
gtttttactccggaggagcgt

SEQ ID NO: 27064 - DNA, 21 bp, Artificial Sequence
  Description of Artificial Sequence: Synthetic oligonucleotide
gtgtttacgtcggtgactacg

SEQ ID NO: 27065 - DNA, 21 bp, Artificial Sequence
  Description of Artificial Sequence: Synthetic oligonucleotide
gtttttactacggggagtccg

SEQ ID NO: 27066 - DNA, 21 bp, Artificial Sequence
  Description of Artificial Sequence: Synthetic oligonucleotide
gtttttgtgggtctgaagccg

SEQ ID NO: 27067 - DNA, 21 bp, Artificial Sequence
  Description of Artificial Sequence: Synthetic oligonucleotide
gttggtgcggctagtgagagg

SEQ ID NO: 27068 - DNA, 21 bp, Artificial Sequence
  Description of Artificial Sequence: Synthetic oligonucleotide
gttggggctgatacgcgtgat

SEQ ID NO: 27069 - DNA, 21 bp, Artificial Sequence
  Description of Artificial Sequence: Synthetic oligonucleotide
gttggtgcgcctaatcggact

SEQ ID NO: 27070 - DNA, 21 bp, Artificial Sequence
  Description of Artificial Sequence: Synthetic oligonucleotide
gttggggcgcctgttgagcgt

SEQ ID NO: 27071 - DNA, 21 bp, Artificial Sequence
  Description of Artificial Sequence: Synthetic oligonucleotide
gtgggtgctagggcgccggct

SEQ ID NO: 27072 - DNA, 21 bp, Artificial Sequence
  Description of Artificial Sequence: Synthetic oligonucleotide
gtgggtgctagtcatgcgaag

SEQ ID NO: 27073 - DNA, 21 bp, Artificial Sequence
  Description of Artificial Sequence: Synthetic oligonucleotide
gttggggctgtgtatagtcag

SEQ ID NO: 27074 - DNA, 21 bp, Artificial Sequence
  Description of Artificial Sequence: Synthetic oligonucleotide
gttggtgatgatagtgtgctt

SEQ ID NO: 27075 - DNA, 21 bp, Artificial Sequence
  Description of Artificial Sequence: Synthetic oligonucleotide
gtgggtgagattatggctatg

SEQ ID NO: 27076 - DNA, 21 bp, Artificial Sequence
  Description of Artificial Sequence: Synthetic oligonucleotide
gttggggagcgtagtagtcgt

SEQ ID NO: 27077 - DNA, 21 bp, Artificial Sequence
  Description of Artificial Sequence: Synthetic oligonucleotide
gtgggtggtgatgatgatatg

SEQ ID NO: 27078 - DNA, 21 bp, Artificial Sequence
  Description of Artificial Sequence: Synthetic oligonucleotide
gttggtggtgatctttgtgat

SEQ ID NO: 27079 - DNA, 21 bp, Artificial Sequence
  Description of Artificial Sequence: Synthetic oligonucleotide
gttgggggtgatagtgtgcct

SEQ ID NO: 27080 - DNA, 21 bp, Artificial Sequence
  Description of Artificial Sequence: Synthetic oligonucleotide
gtggggggtggtcatgggacg

SEQ ID NO: 27081 - DNA, 21 bp, Artificial Sequence
  Description of Artificial Sequence: Synthetic oligonucleotide
gtgggtggtggtactgggccg

SEQ ID NO: 27082 - DNA, 21 bp, Artificial Sequence
  Description of Artificial Sequence: Synthetic oligonucleotide
gttggtgggatggatcttacg

SEQ ID NO: 27083 - DNA, 21 bp, Artificial Sequence
  Description of Artificial Sequence: Synthetic oligonucleotide
gtgggggggccgattggttat

SEQ ID NO: 27084 - DNA, 21 bp, Artificial Sequence
  Description of Artificial Sequence: Synthetic oligonucleotide
gtggggcatcctttgaagcct

SEQ ID NO: 27085 - DNA, 21 bp, Artificial Sequence
  Description of Artificial Sequence: Synthetic oligonucleotide
gttggtcattctttgatgcct

SEQ ID NO: 27086 - DNA, 21 bp, Artificial Sequence
  Description of Artificial Sequence: Synthetic oligonucleotide
gtggggcatagtatgcctcct

SEQ ID NO: 27087 - DNA, 21 bp, Artificial Sequence
  Description of Artificial Sequence: Synthetic oligonucleotide
gttggtcatagtgtgactctt

SEQ ID NO: 27088 - DNA, 21 bp, Artificial Sequence
  Description of Artificial Sequence: Synthetic oligonucleotide
gtgggtaaggatatgagtgtg

SEQ ID NO: 27089 - DNA, 21 bp, Artificial Sequence
  Description of Artificial Sequence: Synthetic oligonucleotide
gttggtaagggtgaggcttct

SEQ ID NO: 27090 - DNA, 21 bp, Artificial Sequence
  Description of Artificial Sequence: Synthetic oligonucleotide
gttggtaagctggttaattgt

SEQ ID NO: 27091 - DNA, 21 bp, Artificial Sequence
  Description of Artificial Sequence: Synthetic oligonucleotide
gtgggtttgcctccggcgccg

SEQ ID NO: 27092 - DNA, 21 bp, Artificial Sequence
  Description of Artificial Sequence: Synthetic oligonucleotide
gttgggcttcagcataatctt

SEQ ID NO: 27093 - DNA, 21 bp, Artificial Sequence
  Description of Artificial Sequence: Synthetic oligonucleotide
gttggtttgacttcgacggtg

SEQ ID NO: 27094 - DNA, 21 bp, Artificial Sequence
  Description of Artificial Sequence: Synthetic oligonucleotide
gttgggatgaggattccggcg

SEQ ID NO: 27095 - DNA, 21 bp, Artificial Sequence
  Description of Artificial Sequence: Synthetic oligonucleotide
gtgggtaataaggggattagt

SEQ ID NO: 27096 - DNA, 21 bp, Artificial Sequence
  Description of Artificial Sequence: Synthetic oligonucleotide
gttggtaatttgcaggctttt

SEQ ID NO: 27097 - DNA, 21 bp, Artificial Sequence
  Description of Artificial Sequence: Synthetic oligonucleotide
gtggggaatcgggcgtttatt

SEQ ID NO: 27098 - DNA, 21 bp, Artificial Sequence
  Description of Artificial Sequence: Synthetic oligonucleotide
gttggtaattctttgcatgct

SEQ ID NO: 27099 - DNA, 21 bp, Artificial Sequence
  Description of Artificial Sequence: Synthetic oligonucleotide
gttgggaattatgtgggtagg

SEQ ID NO: 27100 - DNA, 21 bp, Artificial Sequence
  Description of Artificial Sequence: Synthetic oligonucleotide
gtgggtcctactggttcggct

SEQ ID NO: 27101 - DNA, 21 bp, Artificial Sequence
  Description of Artificial Sequence: Synthetic oligonucleotide
gttggtcagaatgctgagtgg

SEQ ID NO: 27102 - DNA, 21 bp, Artificial Sequence
  Description of Artificial Sequence: Synthetic oligonucleotide
gttggtcgtctgacgatgcct

SEQ ID NO: 27103 - DNA, 21 bp, Artificial Sequence
  Description of Artificial Sequence: Synthetic oligonucleotide
gtggggaggtcggtgcttgat

SEQ ID NO: 27104 - DNA, 21 bp, Artificial Sequence
  Description of Artificial Sequence: Synthetic oligonucleotide
gtgggttcgtttattccgact

SEQ ID NO: 27105 - DNA, 21 bp, Artificial Sequence
  Description of Artificial Sequence: Synthetic oligonucleotide
gttggtagtggtgcgcctgag

SEQ ID NO: 27106 - DNA, 21 bp, Artificial Sequence
  Description of Artificial Sequence: Synthetic oligonucleotide
gttgggtctggtcttgataat

SEQ ID NO: 27107 - DNA, 21 bp, Artificial Sequence
  Description of Artificial Sequence: Synthetic oligonucleotide
gtggggtcgattgatttgcct

SEQ ID NO: 27108 - DNA, 21 bp, Artificial Sequence
  Description of Artificial Sequence: Synthetic oligonucleotide
gttggttcgaaggctctgttg

SEQ ID NO: 27109 - DNA, 21 bp, Artificial Sequence
  Description of Artificial Sequence: Synthetic oligonucleotide
gttggttctctttggcttgat

SEQ ID NO: 27110 - DNA, 21 bp, Artificial Sequence
  Description of Artificial Sequence: Synthetic oligonucleotide
gtggggtcgccgaagcctacg

SEQ ID NO: 27111 - DNA, 21 bp, Artificial Sequence
  Description of Artificial Sequence: Synthetic oligonucleotide
gttgggagtcagtatctgccg

SEQ ID NO: 27112 - DNA, 21 bp, Artificial Sequence
  Description of Artificial Sequence: Synthetic oligonucleotide
gttgggtctcgtgctacgagt

SEQ ID NO: 27113 - DNA, 21 bp, Artificial Sequence
  Description of Artificial Sequence: Synthetic oligonucleotide
gttgggtcgtctaagggggct

SEQ ID NO: 27114 - DNA, 21 bp, Artificial Sequence
  Description of Artificial Sequence: Synthetic oligonucleotide
gtggggagttctgtggatgct

SEQ ID NO: 27115 - DNA, 21 bp, Artificial Sequence
  Description of Artificial Sequence: Synthetic oligonucleotide
gtgggttcgactgggaggact

SEQ ID NO: 27116 - DNA, 21 bp, Artificial Sequence
  Description of Artificial Sequence: Synthetic oligonucleotide
gttggtagtactcgtgagctt

SEQ ID NO: 27117 - DNA, 21 bp, Artificial Sequence
  Description of Artificial Sequence: Synthetic oligonucleotide
gttggttcttatattactgtt

SEQ ID NO: 27118 - DNA, 21 bp, Artificial Sequence
  Description of Artificial Sequence: Synthetic oligonucleotide
gttgggacggttactaggccg

SEQ ID NO: 27119 - DNA, 21 bp, Artificial Sequence
  Description of Artificial Sequence: Synthetic oligonucleotide
gttggtgtgacgatgccgtat

SEQ ID NO: 27120 - DNA, 21 bp, Artificial Sequence
  Description of Artificial Sequence: Synthetic oligonucleotide
gtggggtatgaggcgcatgcg

SEQ ID NO: 27121 - DNA, 21 bp, Artificial Sequence
  Description of Artificial Sequence: Synthetic oligonucleotide
gttggttatccggcgaatccg

SEQ ID NO: 27122 - DNA, 21 bp, Artificial Sequence
  Description of Artificial Sequence: Synthetic oligonucleotide
gttcatgcggagcttatgcgt

SEQ ID NO: 27123 - DNA, 21 bp, Artificial Sequence
  Description of Artificial Sequence: Synthetic oligonucleotide
gttcatgcttcgactgctgtg

SEQ ID NO: 27124 - DNA, 21 bp, Artificial Sequence
  Description of Artificial Sequence: Synthetic oligonucleotide
gtgcatgatggtgggcgtcat

SEQ ID NO: 27125 - DNA, 21 bp, Artificial Sequence
  Description of Artificial Sequence: Synthetic oligonucleotide
gttcatgatgggaagattcgt

SEQ ID NO: 27126 - DNA, 21 bp, Artificial Sequence
  Description of Artificial Sequence: Synthetic oligonucleotide
gttcatgagaatgggtcggtt

SEQ ID NO: 27127 - DNA, 21 bp, Artificial Sequence
  Description of Artificial Sequence: Synthetic oligonucleotide
gtgcatggggctgctcagacg

SEQ ID NO: 27128 - DNA, 21 bp, Artificial Sequence
  Description of Artificial Sequence: Synthetic oligonucleotide
gttcatggtcctatgcagcat

SEQ ID NO: 27129 - DNA, 21 bp, Artificial Sequence
  Description of Artificial Sequence: Synthetic oligonucleotide
gttcatggtacggatccggat

SEQ ID NO: 27130 - DNA, 21 bp, Artificial Sequence
  Description of Artificial Sequence: Synthetic oligonucleotide
gttcatcataatttgacgccg

SEQ ID NO: 27131 - DNA, 21 bp, Artificial Sequence
  Description of Artificial Sequence: Synthetic oligonucleotide
gtgcataagagtgctgattat

SEQ ID NO: 27132 - DNA, 21 bp, Artificial Sequence
  Description of Artificial Sequence: Synthetic oligonucleotide
gttcatcttcctagtatgccg

SEQ ID NO: 27133 - DNA, 21 bp, Artificial Sequence
  Description of Artificial Sequence: Synthetic oligonucleotide
gttcatctgcctactcttgct

SEQ ID NO: 27134 - DNA, 21 bp, Artificial Sequence
  Description of Artificial Sequence: Synthetic oligonucleotide
gttcataatggggggcgttct

SEQ ID NO: 27135 - DNA, 21 bp, Artificial Sequence
  Description of Artificial Sequence: Synthetic oligonucleotide
gtgcataatggtttgacgcct

SEQ ID NO: 27136 - DNA, 21 bp, Artificial Sequence
  Description of Artificial Sequence: Synthetic oligonucleotide
gttcataatatgctgaaggct

SEQ ID NO: 27137 - DNA, 21 bp, Artificial Sequence
  Description of Artificial Sequence: Synthetic oligonucleotide
gtgcatcctcattctgttaat

SEQ ID NO: 27138 - DNA, 21 bp, Artificial Sequence
  Description of Artificial Sequence: Synthetic oligonucleotide
gtgcatcctcgtatgctgacg

SEQ ID NO: 27139 - DNA, 21 bp, Artificial Sequence
  Description of Artificial Sequence: Synthetic oligonucleotide
gtgcatccgagttcggtgact

SEQ ID NO: 27140 - DNA, 21 bp, Artificial Sequence
  Description of Artificial Sequence: Synthetic oligonucleotide
gtgcatccggtgctggcgtcg

SEQ ID NO: 27141 - DNA, 21 bp, Artificial Sequence
  Description of Artificial Sequence: Synthetic oligonucleotide
gtgcatcaggctcgttttgcg

SEQ ID NO: 27142 - DNA, 21 bp, Artificial Sequence
  Description of Artificial Sequence: Synthetic oligonucleotide
gtgcatcaggagcggtcgtgg

SEQ ID NO: 27143 - DNA, 21 bp, Artificial Sequence
  Description of Artificial Sequence: Synthetic oligonucleotide
gttcatcgtcagctggaggat

SEQ ID NO: 27144 - DNA, 21 bp, Artificial Sequence
  Description of Artificial Sequence: Synthetic oligonucleotide
gttcataggacgcaggattct

SEQ ID NO: 27145 - DNA, 21 bp, Artificial Sequence
  Description of Artificial Sequence: Synthetic oligonucleotide
gtgcattcgtttaagttgggg

SEQ ID NO: 27146 - DNA, 21 bp, Artificial Sequence
  Description of Artificial Sequence: Synthetic oligonucleotide
gtgcatagtaattctccttct

SEQ ID NO: 27147 - DNA, 21 bp, Artificial Sequence
  Description of Artificial Sequence: Synthetic oligonucleotide
gttcattcgccgcagcagagt

SEQ ID NO: 27148 - DNA, 21 bp, Artificial Sequence
  Description of Artificial Sequence: Synthetic oligonucleotide
gtgcattcgagtattaatgct

SEQ ID NO: 27149 - DNA, 21 bp, Artificial Sequence
  Description of Artificial Sequence: Synthetic oligonucleotide
gtgcatactccgattgggact

SEQ ID NO: 27150 - DNA, 21 bp, Artificial Sequence
  Description of Artificial Sequence: Synthetic oligonucleotide
gtgcatacgtctacgatttct

SEQ ID NO: 27151 - DNA, 21 bp, Artificial Sequence
  Description of Artificial Sequence: Synthetic oligonucleotide
gtgcatacgactgggatgctg

SEQ ID NO: 27152 - DNA, 21 bp, Artificial Sequence
  Description of Artificial Sequence: Synthetic oligonucleotide
gtgcatgtttctacgatgccg

SEQ ID NO: 27153 - DNA, 21 bp, Artificial Sequence
  Description of Artificial Sequence: Synthetic oligonucleotide
gttcatgttactggtaatctg

SEQ ID NO: 27154 - DNA, 21 bp, Artificial Sequence
  Description of Artificial Sequence: Synthetic oligonucleotide
gtgattgcttctgatatttct

SEQ ID NO: 27155 - DNA, 21 bp, Artificial Sequence
  Description of Artificial Sequence: Synthetic oligonucleotide
gttattgcgacggataggctt

SEQ ID NO: 27156 - DNA, 21 bp, Artificial Sequence
  Description of Artificial Sequence: Synthetic oligonucleotide
gtgattgctgttgatcggatg

SEQ ID NO: 27157 - DNA, 21 bp, Artificial Sequence
  Description of Artificial Sequence: Synthetic oligonucleotide
gttattgattcggagcttgat

SEQ ID NO: 27158 - DNA, 21 bp, Artificial Sequence
  Description of Artificial Sequence: Synthetic oligonucleotide
gtgattgattcgcagaagaag

SEQ ID NO: 27159 - DNA, 21 bp, Artificial Sequence
  Description of Artificial Sequence: Synthetic oligonucleotide
gttattgaggctagtaggaat

SEQ ID NO: 27160 - DNA, 21 bp, Artificial Sequence
  Description of Artificial Sequence: Synthetic oligonucleotide
gttattggtaaggggactcat

SEQ ID NO: 27161 - DNA, 21 bp, Artificial Sequence
  Description of Artificial Sequence: Synthetic oligonucleotide
gttattcatactatgggggcg

SEQ ID NO: 27162 - DNA, 21 bp, Artificial Sequence
  Description of Artificial Sequence: Synthetic oligonucleotide
gtgattattgagacttctgct

SEQ ID NO: 27163 - DNA, 21 bp, Artificial Sequence
  Description of Artificial Sequence: Synthetic oligonucleotide
gtgattttggataaggctgtt

SEQ ID NO: 27164 - DNA, 21 bp, Artificial Sequence
  Description of Artificial Sequence: Synthetic oligonucleotide
gttattttgaagggtgctccg

SEQ ID NO: 27165 - DNA, 21 bp, Artificial Sequence
  Description of Artificial Sequence: Synthetic oligonucleotide
gttattcttacgtctgcggtg

SEQ ID NO: 27166 - DNA, 21 bp, Artificial Sequence
  Description of Artificial Sequence: Synthetic oligonucleotide
gttattaatggtcttgcgtct

SEQ ID NO: 27167 - DNA, 21 bp, Artificial Sequence
  Description of Artificial Sequence: Synthetic oligonucleotide
gttattaatgggttgggtgtg

SEQ ID NO: 27168 - DNA, 21 bp, Artificial Sequence
  Description of Artificial Sequence: Synthetic oligonucleotide
gttattaataatactggtaat

SEQ ID NO: 27169 - DNA, 21 bp, Artificial Sequence
  Description of Artificial Sequence: Synthetic oligonucleotide
gttattcctcctatgcgtagt

SEQ ID NO: 27170 - DNA, 21 bp, Artificial Sequence
  Description of Artificial Sequence: Synthetic oligonucleotide
gtgattcctccttgggatatt

SEQ ID NO: 27171 - DNA, 21 bp, Artificial Sequence
  Description of Artificial Sequence: Synthetic oligonucleotide
gtgattccgcggactttgcag

SEQ ID NO: 27172 - DNA, 21 bp, Artificial Sequence
  Description of Artificial Sequence: Synthetic oligonucleotide
gttattcagttgcgtggggcg

SEQ ID NO: 27173 - DNA, 21 bp, Artificial Sequence
  Description of Artificial Sequence: Synthetic oligonucleotide
gttattcggccgtcgacgcat

SEQ ID NO: 27174 - DNA, 21 bp, Artificial Sequence
  Description of Artificial Sequence: Synthetic oligonucleotide
gttattagtgggttgaatatg

SEQ ID NO: 27175 - DNA, 21 bp, Artificial Sequence
  Description of Artificial Sequence: Synthetic oligonucleotide
gtgatttctcataagactaat

SEQ ID NO: 27176 - DNA, 21 bp, Artificial Sequence
  Description of Artificial Sequence: Synthetic oligonucleotide
gttatttcgcttagtgagctg

SEQ ID NO: 27177 - DNA, 21 bp, Artificial Sequence
  Description of Artificial Sequence: Synthetic oligonucleotide
gttattagtaatacgcgtgat

SEQ ID NO: 27178 - DNA, 21 bp, Artificial Sequence
  Description of Artificial Sequence: Synthetic oligonucleotide
gttatttctcgtaaggggccg

SEQ ID NO: 27179 - DNA, 21 bp, Artificial Sequence
  Description of Artificial Sequence: Synthetic oligonucleotide
gtgatttcttctgcggatctt

SEQ ID NO: 27180 - DNA, 21 bp, Artificial Sequence
  Description of Artificial Sequence: Synthetic oligonucleotide
gttattagttcttttgcggag

SEQ ID NO: 27181 - DNA, 21 bp, Artificial Sequence
  Description of Artificial Sequence: Synthetic oligonucleotide
gttattagtactagtctgccg

SEQ ID NO: 27182 - DNA, 21 bp, Artificial Sequence
  Description of Artificial Sequence: Synthetic oligonucleotide
gtgatttctgtgccggcttcg

SEQ ID NO: 27183 - DNA, 21 bp, Artificial Sequence
  Description of Artificial Sequence: Synthetic oligonucleotide
gttattacggagaagtctgct

SEQ ID NO: 27184 - DNA, 21 bp, Artificial Sequence
  Description of Artificial Sequence: Synthetic oligonucleotide
gtgattacgaggtctggtact

SEQ ID NO: 27185 - DNA, 21 bp, Artificial Sequence
  Description of Artificial Sequence: Synthetic oligonucleotide
gttattacgagtttgggtccg

SEQ ID NO: 27186 - DNA, 21 bp, Artificial Sequence
  Description of Artificial Sequence: Synthetic oligonucleotide
gttattacttctacgggtgcg

SEQ ID NO: 27187 - DNA, 21 bp, Artificial Sequence
  Description of Artificial Sequence: Synthetic oligonucleotide
gtgattgttctgggtcctgtt

SEQ ID NO: 27188 - DNA, 21 bp, Artificial Sequence
  Description of Artificial Sequence: Synthetic oligonucleotide
gttattgttcctgatgtttgg

SEQ ID NO: 27189 - DNA, 21 bp, Artificial Sequence
  Description of Artificial Sequence: Synthetic oligonucleotide
gttaaggatgcttttgcgccg

SEQ ID NO: 27190 - DNA, 21 bp, Artificial Sequence
  Description of Artificial Sequence: Synthetic oligonucleotide
gttaaggatgatcataggtgt

SEQ ID NO: 27191 - DNA, 21 bp, Artificial Sequence
  Description of Artificial Sequence: Synthetic oligonucleotide
gttaaggatcttcctcaggcg

SEQ ID NO: 27192 - DNA, 21 bp, Artificial Sequence
  Description of Artificial Sequence: Synthetic oligonucleotide
gttaaggatcctcggatgtcg

SEQ ID NO: 27193 - DNA, 21 bp, Artificial Sequence
  Description of Artificial Sequence: Synthetic oligonucleotide
gtgaaggattcgactattggt

SEQ ID NO: 27194 - DNA, 21 bp, Artificial Sequence
  Description of Artificial Sequence: Synthetic oligonucleotide
gtgaagtttcagccgtctctt

SEQ ID NO: 27195 - DNA, 21 bp, Artificial Sequence
  Description of Artificial Sequence: Synthetic oligonucleotide
gttaaggggcagctttgttgt

SEQ ID NO: 27196 - DNA, 21 bp, Artificial Sequence
  Description of Artificial Sequence: Synthetic oligonucleotide
gttaagggttattcgaattat

SEQ ID NO: 27197 - DNA, 21 bp, Artificial Sequence
  Description of Artificial Sequence: Synthetic oligonucleotide
gtgaagcttgcgatggaggat

SEQ ID NO: 27198 - DNA, 21 bp, Artificial Sequence
  Description of Artificial Sequence: Synthetic oligonucleotide
gttaagcttggtattcaggcg

SEQ ID NO: 27199 - DNA, 21 bp, Artificial Sequence
  Description of Artificial Sequence: Synthetic oligonucleotide
gtgaagaatgcggttacgcct

SEQ ID NO: 27200 - DNA, 21 bp, Artificial Sequence
  Description of Artificial Sequence: Synthetic oligonucleotide
gtgaagaattgtatggtggag

SEQ ID NO: 27201 - DNA, 21 bp, Artificial Sequence
  Description of Artificial Sequence: Synthetic oligonucleotide
gttaagaatccgatttcgtat

SEQ ID NO: 27202 - DNA, 21 bp, Artificial Sequence
  Description of Artificial Sequence: Synthetic oligonucleotide
gtgaagaatactaatgtgtcg

SEQ ID NO: 27203 - DNA, 21 bp, Artificial Sequence
  Description of Artificial Sequence: Synthetic oligonucleotide
gtgaagaatacttatcctgag

SEQ ID NO: 27204 - DNA, 21 bp, Artificial Sequence
  Description of Artificial Sequence: Synthetic oligonucleotide
gtgaagaattatgagcctcag

SEQ ID NO: 27205 - DNA, 21 bp, Artificial Sequence
  Description of Artificial Sequence: Synthetic oligonucleotide
gttaagcctgatgcttgtttt

SEQ ID NO: 27206 - DNA, 21 bp, Artificial Sequence
  Description of Artificial Sequence: Synthetic oligonucleotide
gtgaagccggggatgatgcct

SEQ ID NO: 27207 - DNA, 21 bp, Artificial Sequence
  Description of Artificial Sequence: Synthetic oligonucleotide
gtgaagccgttggggatgcct

SEQ ID NO: 27208 - DNA, 21 bp, Artificial Sequence
  Description of Artificial Sequence: Synthetic oligonucleotide
gttaagccgatggcgagttcg

SEQ ID NO: 27209 - DNA, 21 bp, Artificial Sequence
  Description of Artificial Sequence: Synthetic oligonucleotide
gtgaagccgtcgccgattttg

SEQ ID NO: 27210 - DNA, 21 bp, Artificial Sequence
  Description of Artificial Sequence: Synthetic oligonucleotide
gtgaagcctactcctgatgcg

SEQ ID NO: 27211 - DNA, 21 bp, Artificial Sequence
  Description of Artificial Sequence: Synthetic oligonucleotide
gtgaagccttattcgcttcat

SEQ ID NO: 27212 - DNA, 21 bp, Artificial Sequence
  Description of Artificial Sequence: Synthetic oligonucleotide
gttaagccgtatgttacgatg

SEQ ID NO: 27213 - DNA, 21 bp, Artificial Sequence
  Description of Artificial Sequence: Synthetic oligonucleotide
gtgaagcagcgtgcgatggtt

SEQ ID NO: 27214 - DNA, 21 bp, Artificial Sequence
  Description of Artificial Sequence: Synthetic oligonucleotide
gtgaagtctgctgagacgatt

SEQ ID NO: 27215 - DNA, 21 bp, Artificial Sequence
  Description of Artificial Sequence: Synthetic oligonucleotide
gtgaagtcggatattcttgct

SEQ ID NO: 27216 - DNA, 21 bp, Artificial Sequence
  Description of Artificial Sequence: Synthetic oligonucleotide
gtgaagagtgagtttcctaag

SEQ ID NO: 27217 - DNA, 21 bp, Artificial Sequence
  Description of Artificial Sequence: Synthetic oligonucleotide
gtgaagtcggagactggggtg

SEQ ID NO: 27218 - DNA, 21 bp, Artificial Sequence
  Description of Artificial Sequence: Synthetic oligonucleotide
gttaagagtcgtgctgagact

SEQ ID NO: 27219 - DNA, 21 bp, Artificial Sequence
  Description of Artificial Sequence: Synthetic oligonucleotide
gtgaagtctagtgatagtact

SEQ ID NO: 27220 - DNA, 21 bp, Artificial Sequence
  Description of Artificial Sequence: Synthetic oligonucleotide
gtgaagactaatgcgacgctg

SEQ ID NO: 27221 - DNA, 21 bp, Artificial Sequence
  Description of Artificial Sequence: Synthetic oligonucleotide
gttaagactcctcctctgacg

SEQ ID NO: 27222 - DNA, 21 bp, Artificial Sequence
  Description of Artificial Sequence: Synthetic oligonucleotide
gttaagacgccttcgttgaat

SEQ ID NO: 27223 - DNA, 21 bp, Artificial Sequence
  Description of Artificial Sequence: Synthetic oligonucleotide
gtgaagactccttgggggcct

SEQ ID NO: 27224 - DNA, 21 bp, Artificial Sequence
  Description of Artificial Sequence: Synthetic oligonucleotide
gttaagacgcagtcggatctg

SEQ ID NO: 27225 - DNA, 21 bp, Artificial Sequence
  Description of Artificial Sequence: Synthetic oligonucleotide
gttaaggtgccgggtgctttt

SEQ ID NO: 27226 - DNA, 21 bp, Artificial Sequence
  Description of Artificial Sequence: Synthetic oligonucleotide
gttttggcgcatagtgatagt

SEQ ID NO: 27227 - DNA, 21 bp, Artificial Sequence
  Description of Artificial Sequence: Synthetic oligonucleotide
gttttggctcattcgacgtat

SEQ ID NO: 27228 - DNA, 21 bp, Artificial Sequence
  Description of Artificial Sequence: Synthetic oligonucleotide
gttttggcgccgttggtttct

SEQ ID NO: 27229 - DNA, 21 bp, Artificial Sequence
  Description of Artificial Sequence: Synthetic oligonucleotide
gttttggcgcggcagtatcct

SEQ ID NO: 27230 - DNA, 21 bp, Artificial Sequence
  Description of Artificial Sequence: Synthetic oligonucleotide
gtgttggcttctacggtttct

SEQ ID NO: 27231 - DNA, 21 bp, Artificial Sequence
  Description of Artificial Sequence: Synthetic oligonucleotide
gtgcttgctacgactgtgggt

SEQ ID NO: 27232 - DNA, 21 bp, Artificial Sequence
  Description of Artificial Sequence: Synthetic oligonucleotide
gtgcttgcgacggtgactaag

SEQ ID NO: 27233 - DNA, 21 bp, Artificial Sequence
  Description of Artificial Sequence: Synthetic oligonucleotide
gttttggcggttcgtacgaat

SEQ ID NO: 27234 - DNA, 21 bp, Artificial Sequence
  Description of Artificial Sequence: Synthetic oligonucleotide
gttcttgattgggagggggat

SEQ ID NO: 27235 - DNA, 21 bp, Artificial Sequence
  Description of Artificial Sequence: Synthetic oligonucleotide
gttcttgagcatcttcatccg

SEQ ID NO: 27236 - DNA, 21 bp, Artificial Sequence
  Description of Artificial Sequence: Synthetic oligonucleotide
gtgctggagaagttgaagact

SEQ ID NO: 27237 - DNA, 21 bp, Artificial Sequence
  Description of Artificial Sequence: Synthetic oligonucleotide
gttttggagcttgagcatcgg

SEQ ID NO: 27238 - DNA, 21 bp, Artificial Sequence
  Description of Artificial Sequence: Synthetic oligonucleotide
gtgcttgagcctctgtctaag

SEQ ID NO: 27239 - DNA, 21 bp, Artificial Sequence
  Description of Artificial Sequence: Synthetic oligonucleotide
gttttggagactcgtactctt

SEQ ID NO: 27240 - DNA, 21 bp, Artificial Sequence
  Description of Artificial Sequence: Synthetic oligonucleotide
gttcttggggggctggcttct

SEQ ID NO: 27241 - DNA, 21 bp, Artificial Sequence
  Description of Artificial Sequence: Synthetic oligonucleotide
gttcttggtctggcgcctgct

SEQ ID NO: 27242 - DNA, 21 bp, Artificial Sequence
  Description of Artificial Sequence: Synthetic oligonucleotide
gtgcttgggcttggggggcct

SEQ ID NO: 27243 - DNA, 21 bp, Artificial Sequence
  Description of Artificial Sequence: Synthetic oligonucleotide
gtgttggggatgggtgagtgg

SEQ ID NO: 27244 - DNA, 21 bp, Artificial Sequence
  Description of Artificial Sequence: Synthetic oligonucleotide
gttctgggtcgtggttattcg

SEQ ID NO: 27245 - DNA, 21 bp, Artificial Sequence
  Description of Artificial Sequence: Synthetic oligonucleotide
gtgctgggttcgctgcagcat

SEQ ID NO: 27246 - DNA, 21 bp, Artificial Sequence
  Description of Artificial Sequence: Synthetic oligonucleotide
gtgttggggtctgtgggttct

SEQ ID NO: 27247 - DNA, 21 bp, Artificial Sequence
  Description of Artificial Sequence: Synthetic oligonucleotide
gtgcttggttatagtaagcct

SEQ ID NO: 27248 - DNA, 21 bp, Artificial Sequence
  Description of Artificial Sequence: Synthetic oligonucleotide
gtgctgcatgctgcttcggct

SEQ ID NO: 27249 - DNA, 21 bp, Artificial Sequence
  Description of Artificial Sequence: Synthetic oligonucleotide
gttcttcatcagaggggtgct

SEQ ID NO: 27250 - DNA, 21 bp, Artificial Sequence
  Description of Artificial Sequence: Synthetic oligonucleotide
gtgttgaaggcgcatcctgat

SEQ ID NO: 27251 - DNA, 21 bp, Artificial Sequence
  Description of Artificial Sequence: Synthetic oligonucleotide
gttttgaagcctggggtgacg

SEQ ID NO: 27252 - DNA, 21 bp, Artificial Sequence
  Description of Artificial Sequence: Synthetic oligonucleotide
gttcttaagccttctgttccg

SEQ ID NO: 27253 - DNA, 21 bp, Artificial Sequence
  Description of Artificial Sequence: Synthetic oligonucleotide
gtgcttaagccttatattaat

SEQ ID NO: 27254 - DNA, 21 bp, Artificial Sequence
  Description of Artificial Sequence: Synthetic oligonucleotide
gtgcttaagtctcattctgcg

SEQ ID NO: 27255 - DNA, 21 bp, Artificial Sequence
  Description of Artificial Sequence: Synthetic oligonucleotide
gttctgaagtcttcggctagt

SEQ ID NO: 27256 - DNA, 21 bp, Artificial Sequence
  Description of Artificial Sequence: Synthetic oligonucleotide
gtgctgcttcctagtcatcct

SEQ ID NO: 27257 - DNA, 21 bp, Artificial Sequence
  Description of Artificial Sequence: Synthetic oligonucleotide
gttctgttgactaagacgtgt

SEQ ID NO: 27258 - DNA, 21 bp, Artificial Sequence
  Description of Artificial Sequence: Synthetic oligonucleotide
gtgttgatgccttctacgatt

SEQ ID NO: 27259 - DNA, 21 bp, Artificial Sequence
  Description of Artificial Sequence: Synthetic oligonucleotide
gttctgatgcctactgaggct

SEQ ID NO: 27260 - DNA, 21 bp, Artificial Sequence
  Description of Artificial Sequence: Synthetic oligonucleotide
gtgttgaatggtaggagttct

SEQ ID NO: 27261 - DNA, 21 bp, Artificial Sequence
  Description of Artificial Sequence: Synthetic oligonucleotide
gttctgaatcatcctactttt

SEQ ID NO: 27262 - DNA, 21 bp, Artificial Sequence
  Description of Artificial Sequence: Synthetic oligonucleotide
gtgttgaatcatcagtcgagt

SEQ ID NO: 27263 - DNA, 21 bp, Artificial Sequence
  Description of Artificial Sequence: Synthetic oligonucleotide
gttcttaatttgacgcagggg

SEQ ID NO: 27264 - DNA, 21 bp, Artificial Sequence
  Description of Artificial Sequence: Synthetic oligonucleotide
gttcttaatccgcttaattct

SEQ ID NO: 27265 - DNA, 21 bp, Artificial Sequence
  Description of Artificial Sequence: Synthetic oligonucleotide
gtgcttaatactgatgttact

SEQ ID NO: 27266 - DNA, 21 bp, Artificial Sequence
  Description of Artificial Sequence: Synthetic oligonucleotide
gtgctgaatactggggttggg

SEQ ID NO: 27267 - DNA, 21 bp, Artificial Sequence
  Description of Artificial Sequence: Synthetic oligonucleotide
gtgttgcctaagacttcggct

SEQ ID NO: 27268 - DNA, 21 bp, Artificial Sequence
  Description of Artificial Sequence: Synthetic oligonucleotide
gttctgccgaattctaagaat

SEQ ID NO: 27269 - DNA, 21 bp, Artificial Sequence
  Description of Artificial Sequence: Synthetic oligonucleotide
gttctgcctccgcttgcggcg

SEQ ID NO: 27270 - DNA, 21 bp, Artificial Sequence
  Description of Artificial Sequence: Synthetic oligonucleotide
gtgttgccgcctaataataag

SEQ ID NO: 27271 - DNA, 21 bp, Artificial Sequence
  Description of Artificial Sequence: Synthetic oligonucleotide
gttcttcctgttcctagggct

SEQ ID NO: 27272 - DNA, 21 bp, Artificial Sequence
  Description of Artificial Sequence: Synthetic oligonucleotide
gtgctgcagggttcttctgct

SEQ ID NO: 27273 - DNA, 21 bp, Artificial Sequence
  Description of Artificial Sequence: Synthetic oligonucleotide
gttttgcagacgactaggccg

SEQ ID NO: 27274 - DNA, 21 bp, Artificial Sequence
  Description of Artificial Sequence: Synthetic oligonucleotide
gttttgcgtggtcatttggct

SEQ ID NO: 27275 - DNA, 21 bp, Artificial Sequence
  Description of Artificial Sequence: Synthetic oligonucleotide
gttcttcgtcttgggactgct

SEQ ID NO: 27276 - DNA, 21 bp, Artificial Sequence
  Description of Artificial Sequence: Synthetic oligonucleotide
gtgcttcgtaatggtgcggag

SEQ ID NO: 27277 - DNA, 21 bp, Artificial Sequence
  Description of Artificial Sequence: Synthetic oligonucleotide
gttcttaggcagagtgtgcct

SEQ ID NO: 27278 - DNA, 21 bp, Artificial Sequence
  Description of Artificial Sequence: Synthetic oligonucleotide
gttctgcgttcggatgcggct

SEQ ID NO: 27279 - DNA, 21 bp, Artificial Sequence
  Description of Artificial Sequence: Synthetic oligonucleotide
gttttgcgtactggtgagttt

SEQ ID NO: 27280 - DNA, 21 bp, Artificial Sequence
  Description of Artificial Sequence: Synthetic oligonucleotide
gtgttgcggactagttctggt

SEQ ID NO: 27281 - DNA, 21 bp, Artificial Sequence
  Description of Artificial Sequence: Synthetic oligonucleotide
gtgctttctcatgatgttgtt

SEQ ID NO: 27282 - DNA, 21 bp, Artificial Sequence
  Description of Artificial Sequence: Synthetic oligonucleotide
gttttgtctcatgggggtgct

SEQ ID NO: 27283 - DNA, 21 bp, Artificial Sequence
  Description of Artificial Sequence: Synthetic oligonucleotide
gttttgtcgccgaatacggct

SEQ ID NO: 27284 - DNA, 21 bp, Artificial Sequence
  Description of Artificial Sequence: Synthetic oligonucleotide
gttttgagtccgactggtatg

SEQ ID NO: 27285 - DNA, 21 bp, Artificial Sequence
  Description of Artificial Sequence: Synthetic oligonucleotide
gtgcttagtagggggaatacg

SEQ ID NO: 27286 - DNA, 21 bp, Artificial Sequence
  Description of Artificial Sequence: Synthetic oligonucleotide
gttttgagttctaattcgtat

SEQ ID NO: 27287 - DNA, 21 bp, Artificial Sequence
  Description of Artificial Sequence: Synthetic oligonucleotide
gttctttcgacgattagttcg

SEQ ID NO: 27288 - DNA, 21 bp, Artificial Sequence
  Description of Artificial Sequence: Synthetic oligonucleotide
gtgctgtcgactatgagtcct

SEQ ID NO: 27289 - DNA, 21 bp, Artificial Sequence
  Description of Artificial Sequence: Synthetic oligonucleotide
gttctttcggtttcgggtcgt

SEQ ID NO: 27290 - DNA, 21 bp, Artificial Sequence
  Description of Artificial Sequence: Synthetic oligonucleotide
gtgttgtcgtatcatactggg

SEQ ID NO: 27291 - DNA, 21 bp, Artificial Sequence
  Description of Artificial Sequence: Synthetic oligonucleotide
gttcttactgctacgatgagt

SEQ ID NO: 27292 - DNA, 21 bp, Artificial Sequence
  Description of Artificial Sequence: Synthetic oligonucleotide
gttcttacgggtcagcggctg

SEQ ID NO: 27293 - DNA, 21 bp, Artificial Sequence
  Description of Artificial Sequence: Synthetic oligonucleotide
gttctgactcagcagcctgtt

SEQ ID NO: 27294 - DNA, 21 bp, Artificial Sequence
  Description of Artificial Sequence: Synthetic oligonucleotide
gtgttgacgcgtgcggggatt

SEQ ID NO: 27295 - DNA, 21 bp, Artificial Sequence
  Description of Artificial Sequence: Synthetic oligonucleotide
gttttgacgagtaatactccg

SEQ ID NO: 27296 - DNA, 21 bp, Artificial Sequence
  Description of Artificial Sequence: Synthetic oligonucleotide
gttttggtggcggctagtatg

SEQ ID NO: 27297 - DNA, 21 bp, Artificial Sequence
  Description of Artificial Sequence: Synthetic oligonucleotide
gtgttggttaggagtggtagt

SEQ ID NO: 27298 - DNA, 21 bp, Artificial Sequence
  Description of Artificial Sequence: Synthetic oligonucleotide
gttttggtggtgcctaatcat

SEQ ID NO: 27299 - DNA, 21 bp, Artificial Sequence
  Description of Artificial Sequence: Synthetic oligonucleotide
gttttggtggtgagggggacg

SEQ ID NO: 27300 - DNA, 21 bp, Artificial Sequence
  Description of Artificial Sequence: Synthetic oligonucleotide
gttctgtattctggtttgtct

SEQ ID NO: 27301 - DNA, 21 bp, Artificial Sequence
  Description of Artificial Sequence: Synthetic oligonucleotide
gttttgtatactaatttggag

SEQ ID NO: 27302 - DNA, 21 bp, Artificial Sequence
  Description of Artificial Sequence: Synthetic oligonucleotide
gtgatggatgggctggagccg

SEQ ID NO: 27303 - DNA, 21 bp, Artificial Sequence
  Description of Artificial Sequence: Synthetic oligonucleotide
gtgatggatggggttcgtccg

SEQ ID NO: 27304 - DNA, 21 bp, Artificial Sequence
  Description of Artificial Sequence: Synthetic oligonucleotide
gtgatgggtgctaagggtttg

SEQ ID NO: 27305 - DNA, 21 bp, Artificial Sequence
  Description of Artificial Sequence: Synthetic oligonucleotide
gttatggggggtaatcctagt

SEQ ID NO: 27306 - DNA, 21 bp, Artificial Sequence
  Description of Artificial Sequence: Synthetic oligonucleotide
gttatgcatctggctgatgat

SEQ ID NO: 27307 - DNA, 21 bp, Artificial Sequence
  Description of Artificial Sequence: Synthetic oligonucleotide
gttatgaatctgttgaagcat

SEQ ID NO: 27308 - DNA, 21 bp, Artificial Sequence
  Description of Artificial Sequence: Synthetic oligonucleotide
gttatgaatctttctactatg

SEQ ID NO: 27309 - DNA, 21 bp, Artificial Sequence
  Description of Artificial Sequence: Synthetic oligonucleotide
gttatgaatagtcctcgttcg

SEQ ID NO: 27310 - DNA, 21 bp, Artificial Sequence
  Description of Artificial Sequence: Synthetic oligonucleotide
gttatgccttttacgcatgat

SEQ ID NO: 27311 - DNA, 21 bp, Artificial Sequence
  Description of Artificial Sequence: Synthetic oligonucleotide
gtgatgccgaatactccttct

SEQ ID NO: 27312 - DNA, 21 bp, Artificial Sequence
  Description of Artificial Sequence: Synthetic oligonucleotide
gttatgccgcagcggttgtcg

SEQ ID NO: 27313 - DNA, 21 bp, Artificial Sequence
  Description of Artificial Sequence: Synthetic oligonucleotide
gttatgccttctgcttctgcg

SEQ ID NO: 27314 - DNA, 21 bp, Artificial Sequence
  Description of Artificial Sequence: Synthetic oligonucleotide
gttatgcctagtctggtgagt

SEQ ID NO: 27315 - DNA, 21 bp, Artificial Sequence
  Description of Artificial Sequence: Synthetic oligonucleotide
gtgatgcaggcgtcgaatagt

SEQ ID NO: 27316 - DNA, 21 bp, Artificial Sequence
  Description of Artificial Sequence: Synthetic oligonucleotide
gtgatgcaggagaattgtccg

SEQ ID NO: 27317 - DNA, 21 bp, Artificial Sequence
  Description of Artificial Sequence: Synthetic oligonucleotide
gtgatgcagcttggtgagagt

SEQ ID NO: 27318 - DNA, 21 bp, Artificial Sequence
  Description of Artificial Sequence: Synthetic oligonucleotide
gtgatgcagtcgattttggct

SEQ ID NO: 27319 - DNA, 21 bp, Artificial Sequence
  Description of Artificial Sequence: Synthetic oligonucleotide
gtgatgcggctggataagcag

SEQ ID NO: 27320 - DNA, 21 bp, Artificial Sequence
  Description of Artificial Sequence: Synthetic oligonucleotide
gttatgcggcctgataggtcg

SEQ ID NO: 27321 - DNA, 21 bp, Artificial Sequence
  Description of Artificial Sequence: Synthetic oligonucleotide
gtgatgagtgcggttgatttg

SEQ ID NO: 27322 - DNA, 21 bp, Artificial Sequence
  Description of Artificial Sequence: Synthetic oligonucleotide
gttatgtctgattcgaaggtg

SEQ ID NO: 27323 - DNA, 21 bp, Artificial Sequence
  Description of Artificial Sequence: Synthetic oligonucleotide
gttatgagtatgcctcgtttg

SEQ ID NO: 27324 - DNA, 21 bp, Artificial Sequence
  Description of Artificial Sequence: Synthetic oligonucleotide
gtgatgtctccggattctatg

SEQ ID NO: 27325 - DNA, 21 bp, Artificial Sequence
  Description of Artificial Sequence: Synthetic oligonucleotide
gttatgagtagtaggactacg

SEQ ID NO: 27326 - DNA, 21 bp, Artificial Sequence
  Description of Artificial Sequence: Synthetic oligonucleotide
gtgatgacggatgcgctgcat

SEQ ID NO: 27327 - DNA, 21 bp, Artificial Sequence
  Description of Artificial Sequence: Synthetic oligonucleotide
gtgatgactagtcatcctatg

SEQ ID NO: 27328 - DNA, 21 bp, Artificial Sequence
  Description of Artificial Sequence: Synthetic oligonucleotide
gttatgacgagtcaggctatg

SEQ ID NO: 27329 - DNA, 21 bp, Artificial Sequence
  Description of Artificial Sequence: Synthetic oligonucleotide
gttatgactacgactggtcat

SEQ ID NO: 27330 - DNA, 21 bp, Artificial Sequence
  Description of Artificial Sequence: Synthetic oligonucleotide
gtgatgactgtggcttctctg

SEQ ID NO: 27331 - DNA, 21 bp, Artificial Sequence
  Description of Artificial Sequence: Synthetic oligonucleotide
gttatggttgagtctgggccg

SEQ ID NO: 27332 - DNA, 21 bp, Artificial Sequence
  Description of Artificial Sequence: Synthetic oligonucleotide
gttaatgcgaagtcgtcgact

SEQ ID NO: 27333 - DNA, 21 bp, Artificial Sequence
  Description of Artificial Sequence: Synthetic oligonucleotide
gtgaatgcgttgtctagtgct

SEQ ID NO: 27334 - DNA, 21 bp, Artificial Sequence
  Description of Artificial Sequence: Synthetic oligonucleotide
gttaatgcggttggggcgcct

SEQ ID NO: 27335 - DNA, 21 bp, Artificial Sequence
  Description of Artificial Sequence: Synthetic oligonucleotide
gttaatgatgtgttgcctact

SEQ ID NO: 27336 - DNA, 21 bp, Artificial Sequence
  Description of Artificial Sequence: Synthetic oligonucleotide
gttaatgattatgcgcatagt

SEQ ID NO: 27337 - DNA, 21 bp, Artificial Sequence
  Description of Artificial Sequence: Synthetic oligonucleotide
gtgaatgagctgggtaggacg

SEQ ID NO: 27338 - DNA, 21 bp, Artificial Sequence
  Description of Artificial Sequence: Synthetic oligonucleotide
gtgaatgagttggttcggact

SEQ ID NO: 27339 - DNA, 21 bp, Artificial Sequence
  Description of Artificial Sequence: Synthetic oligonucleotide
gttaattttaatccgatttcg

SEQ ID NO: 27340 - DNA, 21 bp, Artificial Sequence
  Description of Artificial Sequence: Synthetic oligonucleotide
gttaatgggcatgcgctgact

SEQ ID NO: 27341 - DNA, 21 bp, Artificial Sequence
  Description of Artificial Sequence: Synthetic oligonucleotide
gttaatgggcttaatgttgtt

SEQ ID NO: 27342 - DNA, 21 bp, Artificial Sequence
  Description of Artificial Sequence: Synthetic oligonucleotide
gtgaatgggaatgagcatggt

SEQ ID NO: 27343 - DNA, 21 bp, Artificial Sequence
  Description of Artificial Sequence: Synthetic oligonucleotide
gttaatgggtctgctttttcg

SEQ ID NO: 27344 - DNA, 21 bp, Artificial Sequence
  Description of Artificial Sequence: Synthetic oligonucleotide
gtgaatcatatgtcgtctcct

SEQ ID NO: 27345 - DNA, 21 bp, Artificial Sequence
  Description of Artificial Sequence: Synthetic oligonucleotide
gtgaatcataggtctgctccg

SEQ ID NO: 27346 - DNA, 21 bp, Artificial Sequence
  Description of Artificial Sequence: Synthetic oligonucleotide
gtgaataaggatcctttggcg

SEQ ID NO: 27347 - DNA, 21 bp, Artificial Sequence
  Description of Artificial Sequence: Synthetic oligonucleotide
gttaataagggtgtgtctgct

SEQ ID NO: 27348 - DNA, 21 bp, Artificial Sequence
  Description of Artificial Sequence: Synthetic oligonucleotide
gttaataagtctggttatcct

SEQ ID NO: 27349 - DNA, 21 bp, Artificial Sequence
  Description of Artificial Sequence: Synthetic oligonucleotide
gtgaataagtctacggtgtct

SEQ ID NO: 27350 - DNA, 21 bp, Artificial Sequence
  Description of Artificial Sequence: Synthetic oligonucleotide
gttaataagagttattcgatg

SEQ ID NO: 27351 - DNA, 21 bp, Artificial Sequence
  Description of Artificial Sequence: Synthetic oligonucleotide
gttaatttggcgtctagtgtg

SEQ ID NO: 27352 - DNA, 21 bp, Artificial Sequence
  Description of Artificial Sequence: Synthetic oligonucleotide
gttaatcttgggtctaataat

SEQ ID NO: 27353 - DNA, 21 bp, Artificial Sequence
  Description of Artificial Sequence: Synthetic oligonucleotide
gttaatttgcggctgggttcg

SEQ ID NO: 27354 - DNA, 21 bp, Artificial Sequence
  Description of Artificial Sequence: Synthetic oligonucleotide
gttaatctgtcgagtgtttgt

SEQ ID NO: 27355 - DNA, 21 bp, Artificial Sequence
  Description of Artificial Sequence: Synthetic oligonucleotide
gtgaatctggtgcatggtgtt

SEQ ID NO: 27356 - DNA, 21 bp, Artificial Sequence
  Description of Artificial Sequence: Synthetic oligonucleotide
gttaatctgtatcttacggag

SEQ ID NO: 27357 - DNA, 21 bp, Artificial Sequence
  Description of Artificial Sequence: Synthetic oligonucleotide
gtgaataatactaggaatgtt

SEQ ID NO: 27358 - DNA, 21 bp, Artificial Sequence
  Description of Artificial Sequence: Synthetic oligonucleotide
gttaatcctccgaatgttggt

SEQ ID NO: 27359 - DNA, 21 bp, Artificial Sequence
  Description of Artificial Sequence: Synthetic oligonucleotide
gttaatccgccttcgcgtccg

SEQ ID NO: 27360 - DNA, 21 bp, Artificial Sequence
  Description of Artificial Sequence: Synthetic oligonucleotide
gttaatcctcctacgcatgtt

SEQ ID NO: 27361 - DNA, 21 bp, Artificial Sequence
  Description of Artificial Sequence: Synthetic oligonucleotide
gttaatccgcgtgtggttcag

SEQ ID NO: 27362 - DNA, 21 bp, Artificial Sequence
  Description of Artificial Sequence: Synthetic oligonucleotide
gttaatccttcggcttcgtct

SEQ ID NO: 27363 - DNA, 21 bp, Artificial Sequence
  Description of Artificial Sequence: Synthetic oligonucleotide
gttaatcctagtagtccttcg

SEQ ID NO: 27364 - DNA, 21 bp, Artificial Sequence
  Description of Artificial Sequence: Synthetic oligonucleotide
gtgaatcggtctgttagtccg

SEQ ID NO: 27365 - DNA, 21 bp, Artificial Sequence
  Description of Artificial Sequence: Synthetic oligonucleotide
gtgaatcgtacgacgttgtat

SEQ ID NO: 27366 - DNA, 21 bp, Artificial Sequence
  Description of Artificial Sequence: Synthetic oligonucleotide
gtgaatagtgcgtctaagtcg

SEQ ID NO: 27367 - DNA, 21 bp, Artificial Sequence
  Description of Artificial Sequence: Synthetic oligonucleotide
gttaattcttttgagcgttct

SEQ ID NO: 27368 - DNA, 21 bp, Artificial Sequence
  Description of Artificial Sequence: Synthetic oligonucleotide
gtgaattcgggggcgactact

SEQ ID NO: 27369 - DNA, 21 bp, Artificial Sequence
  Description of Artificial Sequence: Synthetic oligonucleotide
gttaattcgatggagaggccg

SEQ ID NO: 27370 - DNA, 21 bp, Artificial Sequence
  Description of Artificial Sequence: Synthetic oligonucleotide
gtgaattctaggctgattgct

SEQ ID NO: 27371 - DNA, 21 bp, Artificial Sequence
  Description of Artificial Sequence: Synthetic oligonucleotide
gtgaattcttctctgcatggt

SEQ ID NO: 27372 - DNA, 21 bp, Artificial Sequence
  Description of Artificial Sequence: Synthetic oligonucleotide
gtgaattcgtcgaatagtcgg

SEQ ID NO: 27373 - DNA, 21 bp, Artificial Sequence
  Description of Artificial Sequence: Synthetic oligonucleotide
gttaattcgagtgtttgggct

SEQ ID NO: 27374 - DNA, 21 bp, Artificial Sequence
  Description of Artificial Sequence: Synthetic oligonucleotide
gtgaatagtactgcgtttcat

SEQ ID NO: 27375 - DNA, 21 bp, Artificial Sequence
  Description of Artificial Sequence: Synthetic oligonucleotide
gtgaatacgaaggttgggccg

SEQ ID NO: 27376 - DNA, 21 bp, Artificial Sequence
  Description of Artificial Sequence: Synthetic oligonucleotide
gtgaatactctgactggtgat

SEQ ID NO: 27377 - DNA, 21 bp, Artificial Sequence
  Description of Artificial Sequence: Synthetic oligonucleotide
gtgaatactaatcttgcgagt

SEQ ID NO: 27378 - DNA, 21 bp, Artificial Sequence
  Description of Artificial Sequence: Synthetic oligonucleotide
gttaatacttctggttggcag

SEQ ID NO: 27379 - DNA, 21 bp, Artificial Sequence
  Description of Artificial Sequence: Synthetic oligonucleotide
gttaatacggttccttatggt

SEQ ID NO: 27380 - DNA, 21 bp, Artificial Sequence
  Description of Artificial Sequence: Synthetic oligonucleotide
gtgaatactgtgacgtcgtcg

SEQ ID NO: 27381 - DNA, 21 bp, Artificial Sequence
  Description of Artificial Sequence: Synthetic oligonucleotide
gtgaatgttggtactctttat

SEQ ID NO: 27382 - DNA, 21 bp, Artificial Sequence
  Description of Artificial Sequence: Synthetic oligonucleotide
gttaatgtgaagagggaggtt

SEQ ID NO: 27383 - DNA, 21 bp, Artificial Sequence
  Description of Artificial Sequence: Synthetic oligonucleotide
gtgaatgttagggagactacg

SEQ ID NO: 27384 - DNA, 21 bp, Artificial Sequence
  Description of Artificial Sequence: Synthetic oligonucleotide
gtgaatgtgtctcattattcg

SEQ ID NO: 27385 - DNA, 21 bp, Artificial Sequence
  Description of Artificial Sequence: Synthetic oligonucleotide
gttaatgtttctcagactggg

SEQ ID NO: 27386 - DNA, 21 bp, Artificial Sequence
  Description of Artificial Sequence: Synthetic oligonucleotide
gttaattatgctccggctgtg

SEQ ID NO: 27387 - DNA, 21 bp, Artificial Sequence
  Description of Artificial Sequence: Synthetic oligonucleotide
gtgaattatcctgagtcgacg

SEQ ID NO: 27388 - DNA, 21 bp, Artificial Sequence
  Description of Artificial Sequence: Synthetic oligonucleotide
gttcctgcgatgactcagggt

SEQ ID NO: 27389 - DNA, 21 bp, Artificial Sequence
  Description of Artificial Sequence: Synthetic oligonucleotide
gttccggctcctggttataat

SEQ ID NO: 27390 - DNA, 21 bp, Artificial Sequence
  Description of Artificial Sequence: Synthetic oligonucleotide
gttcctgcgcagtcgcgtgag

SEQ ID NO: 27391 - DNA, 21 bp, Artificial Sequence
  Description of Artificial Sequence: Synthetic oligonucleotide
gttcctgcgaggtctcctggt

SEQ ID NO: 27392 - DNA, 21 bp, Artificial Sequence
  Description of Artificial Sequence: Synthetic oligonucleotide
gttcctgcgtcgtcgactagt

SEQ ID NO: 27393 - DNA, 21 bp, Artificial Sequence
  Description of Artificial Sequence: Synthetic oligonucleotide
gtgcctgctacggattttcgg

SEQ ID NO: 27394 - DNA, 21 bp, Artificial Sequence
  Description of Artificial Sequence: Synthetic oligonucleotide
gttccggcggtgacgtcgcgt

SEQ ID NO: 27395 - DNA, 21 bp, Artificial Sequence
  Description of Artificial Sequence: Synthetic oligonucleotide
gtgccgtgtccttcgcatact

SEQ ID NO: 27396 - DNA, 21 bp, Artificial Sequence
  Description of Artificial Sequence: Synthetic oligonucleotide
gttccggatgcgagtgatttt

SEQ ID NO: 27397 - DNA, 21 bp, Artificial Sequence
  Description of Artificial Sequence: Synthetic oligonucleotide
gttccggattcttgggatcgg

SEQ ID NO: 27398 - DNA, 21 bp, Artificial Sequence
  Description of Artificial Sequence: Synthetic oligonucleotide
gttccggagcgtgcgactatt

SEQ ID NO: 27399 - DNA, 21 bp, Artificial Sequence
  Description of Artificial Sequence: Synthetic oligonucleotide
gttccggagtatattattacg

SEQ ID NO: 27400 - DNA, 21 bp, Artificial Sequence
  Description of Artificial Sequence: Synthetic oligonucleotide
gttccgtttgcgagtatgacg

SEQ ID NO: 27401 - DNA, 21 bp, Artificial Sequence
  Description of Artificial Sequence: Synthetic oligonucleotide
gttccttttcagtttgagggg

SEQ ID NO: 27402 - DNA, 21 bp, Artificial Sequence
  Description of Artificial Sequence: Synthetic oligonucleotide
gttccgggggcgaatcggatt

SEQ ID NO: 27403 - DNA, 21 bp, Artificial Sequence
  Description of Artificial Sequence: Synthetic oligonucleotide
gtgccgggtgatctgagggtt

SEQ ID NO: 27404 - DNA, 21 bp, Artificial Sequence
  Description of Artificial Sequence: Synthetic oligonucleotide
gttcctggtaagccgggtgat

SEQ ID NO: 27405 - DNA, 21 bp, Artificial Sequence
  Description of Artificial Sequence: Synthetic oligonucleotide
gttccgggtatgacgactttg

SEQ ID NO: 27406 - DNA, 21 bp, Artificial Sequence
  Description of Artificial Sequence: Synthetic oligonucleotide
gtgcctgggaatccggcgact

SEQ ID NO: 27407 - DNA, 21 bp, Artificial Sequence
  Description of Artificial Sequence: Synthetic oligonucleotide
gttccggggcctgtggtggcg

SEQ ID NO: 27408 - DNA, 21 bp, Artificial Sequence
  Description of Artificial Sequence: Synthetic oligonucleotide
gttccgggtcggacgacgccg

SEQ ID NO: 27409 - DNA, 21 bp, Artificial Sequence
  Description of Artificial Sequence: Synthetic oligonucleotide
gtgcctggttctcggagtact

SEQ ID NO: 27410 - DNA, 21 bp, Artificial Sequence
  Description of Artificial Sequence: Synthetic oligonucleotide
gtgcctggttcgagtcggttg

SEQ ID NO: 27411 - DNA, 21 bp, Artificial Sequence
  Description of Artificial Sequence: Synthetic oligonucleotide
gtgccggggtcgtcttctcat

SEQ ID NO: 27412 - DNA, 21 bp, Artificial Sequence
  Description of Artificial Sequence: Synthetic oligonucleotide
gtgccgcatgagaagactccg

SEQ ID NO: 27413 - DNA, 21 bp, Artificial Sequence
  Description of Artificial Sequence: Synthetic oligonucleotide
gttccgcatattgtttctacg

SEQ ID NO: 27414 - DNA, 21 bp, Artificial Sequence
  Description of Artificial Sequence: Synthetic oligonucleotide
gtgccgcatttgacgtcgacg

SEQ ID NO: 27415 - DNA, 21 bp, Artificial Sequence
  Description of Artificial Sequence: Synthetic oligonucleotide
gttcctcatctgacggtggtt

SEQ ID NO: 27416 - DNA, 21 bp, Artificial Sequence
  Description of Artificial Sequence: Synthetic oligonucleotide
gttccgcattattcttcgagt

SEQ ID NO: 27417 - DNA, 21 bp, Artificial Sequence
  Description of Artificial Sequence: Synthetic oligonucleotide
gtgcctattattagtgatcag

SEQ ID NO: 27418 - DNA, 21 bp, Artificial Sequence
  Description of Artificial Sequence: Synthetic oligonucleotide
gttcctaagtttcctctggag

SEQ ID NO: 27419 - DNA, 21 bp, Artificial Sequence
  Description of Artificial Sequence: Synthetic oligonucleotide
gtgcctaagttgtcgtatccg

SEQ ID NO: 27420 - DNA, 21 bp, Artificial Sequence
  Description of Artificial Sequence: Synthetic oligonucleotide
gttccgaagaatgagatgggt

SEQ ID NO: 27421 - DNA, 21 bp, Artificial Sequence
  Description of Artificial Sequence: Synthetic oligonucleotide
gttccgaagcagtctatgcag

SEQ ID NO: 27422 - DNA, 21 bp, Artificial Sequence
  Description of Artificial Sequence: Synthetic oligonucleotide
gtgccgaagcagtctgtgaat

SEQ ID NO: 27423 - DNA, 21 bp, Artificial Sequence
  Description of Artificial Sequence: Synthetic oligonucleotide
gttccgaagcaggtgtcgttt

SEQ ID NO: 27424 - DNA, 21 bp, Artificial Sequence
  Description of Artificial Sequence: Synthetic oligonucleotide
gttccgctggatcatgctgat

SEQ ID NO: 27425 - DNA, 21 bp, Artificial Sequence
  Description of Artificial Sequence: Synthetic oligonucleotide
gtgcctcttgatcggattcat

SEQ ID NO: 27426 - DNA, 21 bp, Artificial Sequence
  Description of Artificial Sequence: Synthetic oligonucleotide
gttccgcttgattcggagagt

SEQ ID NO: 27427 - DNA, 21 bp, Artificial Sequence
  Description of Artificial Sequence: Synthetic oligonucleotide
gttccgcttgggactgatgtt

SEQ ID NO: 27428 - DNA, 21 bp, Artificial Sequence
  Description of Artificial Sequence: Synthetic oligonucleotide
gtgccgttgcatacgagtctt

SEQ ID NO: 27429 - DNA, 21 bp, Artificial Sequence
  Description of Artificial Sequence: Synthetic oligonucleotide
gtgccgcttatttctatggat

SEQ ID NO: 27430 - DNA, 21 bp, Artificial Sequence
  Description of Artificial Sequence: Synthetic oligonucleotide
gttcctcttaataaggcggcg

SEQ ID NO: 27431 - DNA, 21 bp, Artificial Sequence
  Description of Artificial Sequence: Synthetic oligonucleotide
gttccgcttcaggagacgttt

SEQ ID NO: 27432 - DNA, 21 bp, Artificial Sequence
  Description of Artificial Sequence: Synthetic oligonucleotide
gtgcctttgagtggggggttt

SEQ ID NO: 27433 - DNA, 21 bp, Artificial Sequence
  Description of Artificial Sequence: Synthetic oligonucleotide
gtgccgctttctaatatgtcg

SEQ ID NO: 27434 - DNA, 21 bp, Artificial Sequence
  Description of Artificial Sequence: Synthetic oligonucleotide
gtgccgttgtcgcagttgaat

SEQ ID NO: 27435 - DNA, 21 bp, Artificial Sequence
  Description of Artificial Sequence: Synthetic oligonucleotide
gtgcctttgtctgtgactgtt

SEQ ID NO: 27436 - DNA, 21 bp, Artificial Sequence
  Description of Artificial Sequence: Synthetic oligonucleotide
gtgcctctttattctgggtcg

SEQ ID NO: 27437 - DNA, 21 bp, Artificial Sequence
  Description of Artificial Sequence: Synthetic oligonucleotide
gtgcctatgcagacggtgctt

SEQ ID NO: 27438 - DNA, 21 bp, Artificial Sequence
  Description of Artificial Sequence: Synthetic oligonucleotide
gtgcctatgtcgggtgctccg

SEQ ID NO: 27439 - DNA, 21 bp, Artificial Sequence
  Description of Artificial Sequence: Synthetic oligonucleotide
gttcctatgtctaggccttcg

SEQ ID NO: 27440 - DNA, 21 bp, Artificial Sequence
  Description of Artificial Sequence: Synthetic oligonucleotide
gtgcctaatgataggcttcag

SEQ ID NO: 27441 - DNA, 21 bp, Artificial Sequence
  Description of Artificial Sequence: Synthetic oligonucleotide
gttccgaatcattcgactggt

SEQ ID NO: 27442 - DNA, 21 bp, Artificial Sequence
  Description of Artificial Sequence: Synthetic oligonucleotide
gttcctaatcttgaggatgat

SEQ ID NO: 27443 - DNA, 21 bp, Artificial Sequence
  Description of Artificial Sequence: Synthetic oligonucleotide
gttccgcctgctgctcgttcg

SEQ ID NO: 27444 - DNA, 21 bp, Artificial Sequence
  Description of Artificial Sequence: Synthetic oligonucleotide
gtgcctccggcgattcatgcg

SEQ ID NO: 27445 - DNA, 21 bp, Artificial Sequence
  Description of Artificial Sequence: Synthetic oligonucleotide
gttcctccgatttctcctagt

SEQ ID NO: 27446 - DNA, 21 bp, Artificial Sequence
  Description of Artificial Sequence: Synthetic oligonucleotide
gtgccgcctcttaggcaggag

SEQ ID NO: 27447 - DNA, 21 bp, Artificial Sequence
  Description of Artificial Sequence: Synthetic oligonucleotide
gtgcctcctctgacttcgtct

SEQ ID NO: 27448 - DNA, 21 bp, Artificial Sequence
  Description of Artificial Sequence: Synthetic oligonucleotide
gtgccgcctaggcatattaat

SEQ ID NO: 27449 - DNA, 21 bp, Artificial Sequence
  Description of Artificial Sequence: Synthetic oligonucleotide
gttccgccgcgtcagactcat

SEQ ID NO: 27450 - DNA, 21 bp, Artificial Sequence
  Description of Artificial Sequence: Synthetic oligonucleotide
gtgcctccgtctaggcagtct

SEQ ID NO: 27451 - DNA, 21 bp, Artificial Sequence
  Description of Artificial Sequence: Synthetic oligonucleotide
gttcctccttctgtgagtagg

SEQ ID NO: 27452 - DNA, 21 bp, Artificial Sequence
  Description of Artificial Sequence: Synthetic oligonucleotide
gttcctccggtgcagacgcct

SEQ ID NO: 27453 - DNA, 21 bp, Artificial Sequence
  Description of Artificial Sequence: Synthetic oligonucleotide
gtgccgccttatagtgttccg

SEQ ID NO: 27454 - DNA, 21 bp, Artificial Sequence
  Description of Artificial Sequence: Synthetic oligonucleotide
gttcctcagaaggtgacggtg

SEQ ID NO: 27455 - DNA, 21 bp, Artificial Sequence
  Description of Artificial Sequence: Synthetic oligonucleotide
gtgccgcgtgattatcggtat

SEQ ID NO: 27456 - DNA, 21 bp, Artificial Sequence
  Description of Artificial Sequence: Synthetic oligonucleotide
gtgcctcgggagcgggtgaat

SEQ ID NO: 27457 - DNA, 21 bp, Artificial Sequence
  Description of Artificial Sequence: Synthetic oligonucleotide
gtgcctaggggtgatgcggct

SEQ ID NO: 27458 - DNA, 21 bp, Artificial Sequence
  Description of Artificial Sequence: Synthetic oligonucleotide
gttcctcgtaatgcgccggat

SEQ ID NO: 27459 - DNA, 21 bp, Artificial Sequence
  Description of Artificial Sequence: Synthetic oligonucleotide
gtgcctcgtaatgtgacgatg

SEQ ID NO: 27460 - DNA, 21 bp, Artificial Sequence
  Description of Artificial Sequence: Synthetic oligonucleotide
gtgcctcgttctgatacgctg

SEQ ID NO: 27461 - DNA, 21 bp, Artificial Sequence
  Description of Artificial Sequence: Synthetic oligonucleotide
gtgccgcgtagtaatgtgagt

SEQ ID NO: 27462 - DNA, 21 bp, Artificial Sequence
  Description of Artificial Sequence: Synthetic oligonucleotide
gtgccgaggagtcagctgacg

SEQ ID NO: 27463 - DNA, 21 bp, Artificial Sequence
  Description of Artificial Sequence: Synthetic oligonucleotide
gttcctcggtctacgaatttg

SEQ ID NO: 27464 - DNA, 21 bp, Artificial Sequence
  Description of Artificial Sequence: Synthetic oligonucleotide
gttcctcggacggggtcgaat

SEQ ID NO: 27465 - DNA, 21 bp, Artificial Sequence
  Description of Artificial Sequence: Synthetic oligonucleotide
gttccgaggactctgactcct

SEQ ID NO: 27466 - DNA, 21 bp, Artificial Sequence
  Description of Artificial Sequence: Synthetic oligonucleotide
gttcctagtgcgactaagatt

SEQ ID NO: 27467 - DNA, 21 bp, Artificial Sequence
  Description of Artificial Sequence: Synthetic oligonucleotide
gtgcctagtcatattggtgcg

SEQ ID NO: 27468 - DNA, 21 bp, Artificial Sequence
  Description of Artificial Sequence: Synthetic oligonucleotide
gtgccttctaagccttcttat

SEQ ID NO: 27469 - DNA, 21 bp, Artificial Sequence
  Description of Artificial Sequence: Synthetic oligonucleotide
gttccttctaagacgcctttt

SEQ ID NO: 27470 - DNA, 21 bp, Artificial Sequence
  Description of Artificial Sequence: Synthetic oligonucleotide
gtgccttctccttcgtcttcg

SEQ ID NO: 27471 - DNA, 21 bp, Artificial Sequence
  Description of Artificial Sequence: Synthetic oligonucleotide
gtgccttctcggtctcagaat

SEQ ID NO: 27472 - DNA, 21 bp, Artificial Sequence
  Description of Artificial Sequence: Synthetic oligonucleotide
gttcctagttctatttctagt

SEQ ID NO: 27473 - DNA, 21 bp, Artificial Sequence
  Description of Artificial Sequence: Synthetic oligonucleotide
gtgccgagtgtgccgggggcg

SEQ ID NO: 27474 - DNA, 21 bp, Artificial Sequence
  Description of Artificial Sequence: Synthetic oligonucleotide
gttccttcggttgttcgtagt

SEQ ID NO: 27475 - DNA, 21 bp, Artificial Sequence
  Description of Artificial Sequence: Synthetic oligonucleotide
gttccgactgctttgatgagt

SEQ ID NO: 27476 - DNA, 21 bp, Artificial Sequence
  Description of Artificial Sequence: Synthetic oligonucleotide
gtgccgacggattatctgtct

SEQ ID NO: 27477 - DNA, 21 bp, Artificial Sequence
  Description of Artificial Sequence: Synthetic oligonucleotide
gttccgacgcattatgatcct

SEQ ID NO: 27478 - DNA, 21 bp, Artificial Sequence
  Description of Artificial Sequence: Synthetic oligonucleotide
gtgccgacgcggggggagttt

SEQ ID NO: 27479 - DNA, 21 bp, Artificial Sequence
  Description of Artificial Sequence: Synthetic oligonucleotide
gttcctacgtcggctgttaag

SEQ ID NO: 27480 - DNA, 21 bp, Artificial Sequence
  Description of Artificial Sequence: Synthetic oligonucleotide
gtgccgacgacttcggatttt

SEQ ID NO: 27481 - DNA, 21 bp, Artificial Sequence
  Description of Artificial Sequence: Synthetic oligonucleotide
gtgcctacggtttctaatatt

SEQ ID NO: 27482 - DNA, 21 bp, Artificial Sequence
  Description of Artificial Sequence: Synthetic oligonucleotide
gtgccggtggatattcttagt

SEQ ID NO: 27483 - DNA, 21 bp, Artificial Sequence
  Description of Artificial Sequence: Synthetic oligonucleotide
gttcctgttaagactagtccg

SEQ ID NO: 27484 - DNA, 21 bp, Artificial Sequence
  Description of Artificial Sequence: Synthetic oligonucleotide
gtgccggttaagacgacttat

SEQ ID NO: 27485 - DNA, 21 bp, Artificial Sequence
  Description of Artificial Sequence: Synthetic oligonucleotide
gtgcctgtgaatcctagggcg

SEQ ID NO: 27486 - DNA, 21 bp, Artificial Sequence
  Description of Artificial Sequence: Synthetic oligonucleotide
gttccggtgtcgcgtgctttt

SEQ ID NO: 27487 - DNA, 21 bp, Artificial Sequence
  Description of Artificial Sequence: Synthetic oligonucleotide
gttccgtgggattctccggtt

SEQ ID NO: 27488 - DNA, 21 bp, Artificial Sequence
  Description of Artificial Sequence: Synthetic oligonucleotide
gttccttatgggcaggttcat

SEQ ID NO: 27489 - DNA, 21 bp, Artificial Sequence
  Description of Artificial Sequence: Synthetic oligonucleotide
gttccttattcttctctgccg

SEQ ID NO: 27490 - DNA, 21 bp, Artificial Sequence
  Description of Artificial Sequence: Synthetic oligonucleotide
gttccttatactggtatgact

SEQ ID NO: 27491 - DNA, 21 bp, Artificial Sequence
  Description of Artificial Sequence: Synthetic oligonucleotide
gtgccgtatacgtctacggat

SEQ ID NO: 27492 - DNA, 21 bp, Artificial Sequence
  Description of Artificial Sequence: Synthetic oligonucleotide
gttcaggctggtcttcggtct

SEQ ID NO: 27493 - DNA, 21 bp, Artificial Sequence
  Description of Artificial Sequence: Synthetic oligonucleotide
gttcaggcttcgagtatgaag

SEQ ID NO: 27494 - DNA, 21 bp, Artificial Sequence
  Description of Artificial Sequence: Synthetic oligonucleotide
gttcaggatacggattcgact

SEQ ID NO: 27495 - DNA, 21 bp, Artificial Sequence
  Description of Artificial Sequence: Synthetic oligonucleotide
gtgcaggagcctgttgttatg

SEQ ID NO: 27496 - DNA, 21 bp, Artificial Sequence
  Description of Artificial Sequence: Synthetic oligonucleotide
gttcagggtggttcgaatact

SEQ ID NO: 27497 - DNA, 21 bp, Artificial Sequence
  Description of Artificial Sequence: Synthetic oligonucleotide
gttcagggtaggcttgctggt

SEQ ID NO: 27498 - DNA, 21 bp, Artificial Sequence
  Description of Artificial Sequence: Synthetic oligonucleotide
gttcaggggcgttcggggatg

SEQ ID NO: 27499 - DNA, 21 bp, Artificial Sequence
  Description of Artificial Sequence: Synthetic oligonucleotide
gtgcaggggtctaagcctgag

SEQ ID NO: 27500 - DNA, 21 bp, Artificial Sequence
  Description of Artificial Sequence: Synthetic oligonucleotide
gttcagggtacgttgccgagt

SEQ ID NO: 27501 - DNA, 21 bp, Artificial Sequence
  Description of Artificial Sequence: Synthetic oligonucleotide
gttcagcatcttagggctacg

SEQ ID NO: 27502 - DNA, 21 bp, Artificial Sequence
  Description of Artificial Sequence: Synthetic oligonucleotide
gttcagcatccgacgcgtgcg

SEQ ID NO: 27503 - DNA, 21 bp, Artificial Sequence
  Description of Artificial Sequence: Synthetic oligonucleotide
gttcagcatcgtatggaggtt

SEQ ID NO: 27504 - DNA, 21 bp, Artificial Sequence
  Description of Artificial Sequence: Synthetic oligonucleotide
gtgcagcatgttgctgagctg

SEQ ID NO: 27505 - DNA, 21 bp, Artificial Sequence
  Description of Artificial Sequence: Synthetic oligonucleotide
gttcagcttgcttcgaattcg

SEQ ID NO: 27506 - DNA, 21 bp, Artificial Sequence
  Description of Artificial Sequence: Synthetic oligonucleotide
gtgcagttgggtgggcatgtg

SEQ ID NO: 27507 - DNA, 21 bp, Artificial Sequence
  Description of Artificial Sequence: Synthetic oligonucleotide
gttcagatggagaggcatagt

SEQ ID NO: 27508 - DNA, 21 bp, Artificial Sequence
  Description of Artificial Sequence: Synthetic oligonucleotide
gtgcagatgatgcgtgatgcg

SEQ ID NO: 27509 - DNA, 21 bp, Artificial Sequence
  Description of Artificial Sequence: Synthetic oligonucleotide
gtgcagaatgttattggtccg

SEQ ID NO: 27510 - DNA, 21 bp, Artificial Sequence
  Description of Artificial Sequence: Synthetic oligonucleotide
gtgcagccggagattttggct

SEQ ID NO: 27511 - DNA, 21 bp, Artificial Sequence
  Description of Artificial Sequence: Synthetic oligonucleotide
gttcagccggggccgcttgtg

SEQ ID NO: 27512 - DNA, 21 bp, Artificial Sequence
  Description of Artificial Sequence: Synthetic oligonucleotide
gtgcagcctattaatcagtcg

SEQ ID NO: 27513 - DNA, 21 bp, Artificial Sequence
  Description of Artificial Sequence: Synthetic oligonucleotide
gtgcagcctttgcctgcgcat

SEQ ID NO: 27514 - DNA, 21 bp, Artificial Sequence
  Description of Artificial Sequence: Synthetic oligonucleotide
gtgcagccgatgatttcgaat

SEQ ID NO: 27515 - DNA, 21 bp, Artificial Sequence
  Description of Artificial Sequence: Synthetic oligonucleotide
gttcagcctcgtgagtatgtt

SEQ ID NO: 27516 - DNA, 21 bp, Artificial Sequence
  Description of Artificial Sequence: Synthetic oligonucleotide
gtgcagccggtgcagtctgat

SEQ ID NO: 27517 - DNA, 21 bp, Artificial Sequence
  Description of Artificial Sequence: Synthetic oligonucleotide
gtgcagcagaaggggctggcg

SEQ ID NO: 27518 - DNA, 21 bp, Artificial Sequence
  Description of Artificial Sequence: Synthetic oligonucleotide
gtgcagcggatgatggggcct

SEQ ID NO: 27519 - DNA, 21 bp, Artificial Sequence
  Description of Artificial Sequence: Synthetic oligonucleotide
gttcagtctgattcgacgtcg

SEQ ID NO: 27520 - DNA, 21 bp, Artificial Sequence
  Description of Artificial Sequence: Synthetic oligonucleotide
gtgcagtctattccgtcggcg

SEQ ID NO: 27521 - DNA, 21 bp, Artificial Sequence
  Description of Artificial Sequence: Synthetic oligonucleotide
gtgcagtcgcttcatactggt

SEQ ID NO: 27522 - DNA, 21 bp, Artificial Sequence
  Description of Artificial Sequence: Synthetic oligonucleotide
gtgcagagtccgacttgggtt

SEQ ID NO: 27523 - DNA, 21 bp, Artificial Sequence
  Description of Artificial Sequence: Synthetic oligonucleotide
gttcagtcgcggcctgattcg

SEQ ID NO: 27524 - DNA, 21 bp, Artificial Sequence
  Description of Artificial Sequence: Synthetic oligonucleotide
gtgcagtcgagtgtgacgttg

SEQ ID NO: 27525 - DNA, 21 bp, Artificial Sequence
  Description of Artificial Sequence: Synthetic oligonucleotide
gttcagtcgactcttcttgag

SEQ ID NO: 27526 - DNA, 21 bp, Artificial Sequence
  Description of Artificial Sequence: Synthetic oligonucleotide
gttcagagtgttatgcctcat

SEQ ID NO: 27527 - DNA, 21 bp, Artificial Sequence
  Description of Artificial Sequence: Synthetic oligonucleotide
gtgcagagtgttcgtatttcg

SEQ ID NO: 27528 - DNA, 21 bp, Artificial Sequence
  Description of Artificial Sequence: Synthetic oligonucleotide
gtgcagacggcgcctgcggag

SEQ ID NO: 27529 - DNA, 21 bp, Artificial Sequence
  Description of Artificial Sequence: Synthetic oligonucleotide
gtgcagacgcattctgctgct

SEQ ID NO: 27530 - DNA, 21 bp, Artificial Sequence
  Description of Artificial Sequence: Synthetic oligonucleotide
gttcagacgcagccgtatagg

SEQ ID NO: 27531 - DNA, 21 bp, Artificial Sequence
  Description of Artificial Sequence: Synthetic oligonucleotide
gttcagacgagtggttatttg

SEQ ID NO: 27532 - DNA, 21 bp, Artificial Sequence
  Description of Artificial Sequence: Synthetic oligonucleotide
gtgcagtatatgtcgaaggct

SEQ ID NO: 27533 - DNA, 21 bp, Artificial Sequence
  Description of Artificial Sequence: Synthetic oligonucleotide
gtgcagtatcctacggagtcg

SEQ ID NO: 27534 - DNA, 21 bp, Artificial Sequence
  Description of Artificial Sequence: Synthetic oligonucleotide
gtgcagtatagtggtactccg

SEQ ID NO: 27535 - DNA, 21 bp, Artificial Sequence
  Description of Artificial Sequence: Synthetic oligonucleotide
gttcgggctgatgctgcgggg

SEQ ID NO: 27536 - DNA, 21 bp, Artificial Sequence
  Description of Artificial Sequence: Synthetic oligonucleotide
gttagggcgttgccgctgagt

SEQ ID NO: 27537 - DNA, 21 bp, Artificial Sequence
  Description of Artificial Sequence: Synthetic oligonucleotide
gtgagggcgaatccgtcgacg

SEQ ID NO: 27538 - DNA, 21 bp, Artificial Sequence
  Description of Artificial Sequence: Synthetic oligonucleotide
gtgcgtgctcctccgaatgct

SEQ ID NO: 27539 - DNA, 21 bp, Artificial Sequence
  Description of Artificial Sequence: Synthetic oligonucleotide
gtgagggcgcctccttctctt

SEQ ID NO: 27540 - DNA, 21 bp, Artificial Sequence
  Description of Artificial Sequence: Synthetic oligonucleotide
gttagggcgccgcgggaggtt

SEQ ID NO: 27541 - DNA, 21 bp, Artificial Sequence
  Description of Artificial Sequence: Synthetic oligonucleotide
gttcgtgctagtaatacgttg

SEQ ID NO: 27542 - DNA, 21 bp, Artificial Sequence
  Description of Artificial Sequence: Synthetic oligonucleotide
gtgcgggctacgcagactgag

SEQ ID NO: 27543 - DNA, 21 bp, Artificial Sequence
  Description of Artificial Sequence: Synthetic oligonucleotide
gtgcgggctgtgcatccggtt

SEQ ID NO: 27544 - DNA, 21 bp, Artificial Sequence
  Description of Artificial Sequence: Synthetic oligonucleotide
gtgagggctgttcagattaat

SEQ ID NO: 27545 - DNA, 21 bp, Artificial Sequence
  Description of Artificial Sequence: Synthetic oligonucleotide
gttagggatgctgcttcttgt

SEQ ID NO: 27546 - DNA, 21 bp, Artificial Sequence
  Description of Artificial Sequence: Synthetic oligonucleotide
gttcgtgatgatgttgggtgg

SEQ ID NO: 27547 - DNA, 21 bp, Artificial Sequence
  Description of Artificial Sequence: Synthetic oligonucleotide
gttcgggatcctgtgacttcg

SEQ ID NO: 27548 - DNA, 21 bp, Artificial Sequence
  Description of Artificial Sequence: Synthetic oligonucleotide
gtgcgggattcgatgcattcg

SEQ ID NO: 27549 - DNA, 21 bp, Artificial Sequence
  Description of Artificial Sequence: Synthetic oligonucleotide
gttcgtgatacgatggggcag

SEQ ID NO: 27550 - DNA, 21 bp, Artificial Sequence
  Description of Artificial Sequence: Synthetic oligonucleotide
gtgcgtgattggcagacgcag

SEQ ID NO: 27551 - DNA, 21 bp, Artificial Sequence
  Description of Artificial Sequence: Synthetic oligonucleotide
gtgagggaggctacttctttg

SEQ ID NO: 27552 - DNA, 21 bp, Artificial Sequence
  Description of Artificial Sequence: Synthetic oligonucleotide
gttcgggaggtgctggggtcg

SEQ ID NO: 27553 - DNA, 21 bp, Artificial Sequence
  Description of Artificial Sequence: Synthetic oligonucleotide
gttaggtttaatgagcaggcg

SEQ ID NO: 27554 - DNA, 21 bp, Artificial Sequence
  Description of Artificial Sequence: Synthetic oligonucleotide
gtgcgttttaatggtcagact

SEQ ID NO: 27555 - DNA, 21 bp, Artificial Sequence
  Description of Artificial Sequence: Synthetic oligonucleotide
gttcgtggtgcgcttacgccg

SEQ ID NO: 27556 - DNA, 21 bp, Artificial Sequence
  Description of Artificial Sequence: Synthetic oligonucleotide
gtgaggggtgcggttgcggct

SEQ ID NO: 27557 - DNA, 21 bp, Artificial Sequence
  Description of Artificial Sequence: Synthetic oligonucleotide
gtgcgtgggattgtggctccg

SEQ ID NO: 27558 - DNA, 21 bp, Artificial Sequence
  Description of Artificial Sequence: Synthetic oligonucleotide
gttaggggtcctgagatgacg

SEQ ID NO: 27559 - DNA, 21 bp, Artificial Sequence
  Description of Artificial Sequence: Synthetic oligonucleotide
gtgcgtggtcctggggaggat

SEQ ID NO: 27560 - DNA, 21 bp, Artificial Sequence
  Description of Artificial Sequence: Synthetic oligonucleotide
gttagggggcctcatgatacg

SEQ ID NO: 27561 - DNA, 21 bp, Artificial Sequence
  Description of Artificial Sequence: Synthetic oligonucleotide
gttagggggtctctttcgatg

SEQ ID NO: 27562 - DNA, 21 bp, Artificial Sequence
  Description of Artificial Sequence: Synthetic oligonucleotide
gttcgtggtagtctgactagt

SEQ ID NO: 27563 - DNA, 21 bp, Artificial Sequence
  Description of Artificial Sequence: Synthetic oligonucleotide
gtgagggggtcgcagtatgcg

SEQ ID NO: 27564 - DNA, 21 bp, Artificial Sequence
  Description of Artificial Sequence: Synthetic oligonucleotide
gttcgtgggtcgacgcaggct

SEQ ID NO: 27565 - DNA, 21 bp, Artificial Sequence
  Description of Artificial Sequence: Synthetic oligonucleotide
gttcggggtgtgcagctggat

SEQ ID NO: 27566 - DNA, 21 bp, Artificial Sequence
  Description of Artificial Sequence: Synthetic oligonucleotide
gttaggggtgtttcggattcg

SEQ ID NO: 27567 - DNA, 21 bp, Artificial Sequence
  Description of Artificial Sequence: Synthetic oligonucleotide
gtgcgtcatattaagctggag

SEQ ID NO: 27568 - DNA, 21 bp, Artificial Sequence
  Description of Artificial Sequence: Synthetic oligonucleotide
gtgcgtcatccggggccggag

SEQ ID NO: 27569 - DNA, 21 bp, Artificial Sequence
  Description of Artificial Sequence: Synthetic oligonucleotide
gtgcggaaggattatcatctt

SEQ ID NO: 27570 - DNA, 21 bp, Artificial Sequence
  Description of Artificial Sequence: Synthetic oligonucleotide
gtgcgtctggatgcttctatt

SEQ ID NO: 27571 - DNA, 21 bp, Artificial Sequence
  Description of Artificial Sequence: Synthetic oligonucleotide
gttcgtttggatatggctgct

SEQ ID NO: 27572 - DNA, 21 bp, Artificial Sequence
  Description of Artificial Sequence: Synthetic oligonucleotide
gttaggctggatcgggagggt

SEQ ID NO: 27573 - DNA, 21 bp, Artificial Sequence
  Description of Artificial Sequence: Synthetic oligonucleotide
gttcggctgccggatacgtcg

SEQ ID NO: 27574 - DNA, 21 bp, Artificial Sequence
  Description of Artificial Sequence: Synthetic oligonucleotide
gtgaggttgcagggtgggctt

SEQ ID NO: 27575 - DNA, 21 bp, Artificial Sequence
  Description of Artificial Sequence: Synthetic oligonucleotide
gtgaggctgtcggaggttcct

SEQ ID NO: 27576 - DNA, 21 bp, Artificial Sequence
  Description of Artificial Sequence: Synthetic oligonucleotide
gttcggatgctgcctggtgat

SEQ ID NO: 27577 - DNA, 21 bp, Artificial Sequence
  Description of Artificial Sequence: Synthetic oligonucleotide
gtgcggaatgctccgggggcg

SEQ ID NO: 27578 - DNA, 21 bp, Artificial Sequence
  Description of Artificial Sequence: Synthetic oligonucleotide
gttcggaatgcgtctgatttg

SEQ ID NO: 27579 - DNA, 21 bp, Artificial Sequence
  Description of Artificial Sequence: Synthetic oligonucleotide
gttcggaatattccgtcgatg

SEQ ID NO: 27580 - DNA, 21 bp, Artificial Sequence
  Description of Artificial Sequence: Synthetic oligonucleotide
gttaggaatagtgcgatgaat

SEQ ID NO: 27581 - DNA, 21 bp, Artificial Sequence
  Description of Artificial Sequence: Synthetic oligonucleotide
gtgaggccggctgatcagttt

SEQ ID NO: 27582 - DNA, 21 bp, Artificial Sequence
  Description of Artificial Sequence: Synthetic oligonucleotide
gtgaggcctgagcgtgagaat

SEQ ID NO: 27583 - DNA, 21 bp, Artificial Sequence
  Description of Artificial Sequence: Synthetic oligonucleotide
gttcggccgggtaagttgatt

SEQ ID NO: 27584 - DNA, 21 bp, Artificial Sequence
  Description of Artificial Sequence: Synthetic oligonucleotide
gtgaggccgcatatgactgtg

SEQ ID NO: 27585 - DNA, 21 bp, Artificial Sequence
  Description of Artificial Sequence: Synthetic oligonucleotide
gttcggcctattccgcctaat

SEQ ID NO: 27586 - DNA, 21 bp, Artificial Sequence
  Description of Artificial Sequence: Synthetic oligonucleotide
gttcggccgttgtcgattggt

SEQ ID NO: 27587 - DNA, 21 bp, Artificial Sequence
  Description of Artificial Sequence: Synthetic oligonucleotide
gttcgtcctcagacggcgtat

SEQ ID NO: 27588 - DNA, 21 bp, Artificial Sequence
  Description of Artificial Sequence: Synthetic oligonucleotide
gtgcgtcctcgtgatggtatg

SEQ ID NO: 27589 - DNA, 21 bp, Artificial Sequence
  Description of Artificial Sequence: Synthetic oligonucleotide
gttaggccgtctattttggct

SEQ ID NO: 27590 - DNA, 21 bp, Artificial Sequence
  Description of Artificial Sequence: Synthetic oligonucleotide
gttaggccttcgtctcttgag

SEQ ID NO: 27591 - DNA, 21 bp, Artificial Sequence
  Description of Artificial Sequence: Synthetic oligonucleotide
gttaggcctacgaattcgggt

SEQ ID NO: 27592 - DNA, 21 bp, Artificial Sequence
  Description of Artificial Sequence: Synthetic oligonucleotide
gttcggcctactcagaattct

SEQ ID NO: 27593 - DNA, 21 bp, Artificial Sequence
  Description of Artificial Sequence: Synthetic oligonucleotide
gttcggcctgttaaggaggtt

SEQ ID NO: 27594 - DNA, 21 bp, Artificial Sequence
  Description of Artificial Sequence: Synthetic oligonucleotide
gttaggcctgttaatggggtg

SEQ ID NO: 27595 - DNA, 21 bp, Artificial Sequence
  Description of Artificial Sequence: Synthetic oligonucleotide
gttcggcaggagattatttcg

SEQ ID NO: 27596 - DNA, 21 bp, Artificial Sequence
  Description of Artificial Sequence: Synthetic oligonucleotide
gtgaggcagatgacgccgggg

SEQ ID NO: 27597 - DNA, 21 bp, Artificial Sequence
  Description of Artificial Sequence: Synthetic oligonucleotide
gtgaggcagccgggggttgat

SEQ ID NO: 27598 - DNA, 21 bp, Artificial Sequence
  Description of Artificial Sequence: Synthetic oligonucleotide
gttcgtcagtcttcgaatacg

SEQ ID NO: 27599 - DNA, 21 bp, Artificial Sequence
  Description of Artificial Sequence: Synthetic oligonucleotide
gttcggagggtggcttctgag

SEQ ID NO: 27600 - DNA, 21 bp, Artificial Sequence
  Description of Artificial Sequence: Synthetic oligonucleotide
gttcgttcggctatttctgat

SEQ ID NO: 27601 - DNA, 21 bp, Artificial Sequence
  Description of Artificial Sequence: Synthetic oligonucleotide
gttcggagtgcgacttttcat

SEQ ID NO: 27602 - DNA, 21 bp, Artificial Sequence
  Description of Artificial Sequence: Synthetic oligonucleotide
gtgcggtctttggagcagtcg

SEQ ID NO: 27603 - DNA, 21 bp, Artificial Sequence
  Description of Artificial Sequence: Synthetic oligonucleotide
gttaggtctccgtcgcattgt

SEQ ID NO: 27604 - DNA, 21 bp, Artificial Sequence
  Description of Artificial Sequence: Synthetic oligonucleotide
gtgaggtctcagcttccgccg

SEQ ID NO: 27605 - DNA, 21 bp, Artificial Sequence
  Description of Artificial Sequence: Synthetic oligonucleotide
gtgcggagttcgttggatcgg

SEQ ID NO: 27606 - DNA, 21 bp, Artificial Sequence
  Description of Artificial Sequence: Synthetic oligonucleotide
gttcggtcgtctacgtatacg

SEQ ID NO: 27607 - DNA, 21 bp, Artificial Sequence
  Description of Artificial Sequence: Synthetic oligonucleotide
gtgaggtctgtggctcctgag

SEQ ID NO: 27608 - DNA, 21 bp, Artificial Sequence
  Description of Artificial Sequence: Synthetic oligonucleotide
gtgaggactttgccttctccg

SEQ ID NO: 27609 - DNA, 21 bp, Artificial Sequence
  Description of Artificial Sequence: Synthetic oligonucleotide
gtgaggacgatgccgcattcg

SEQ ID NO: 27610 - DNA, 21 bp, Artificial Sequence
  Description of Artificial Sequence: Synthetic oligonucleotide
gttcggactccgtttgaggct

SEQ ID NO: 27611 - DNA, 21 bp, Artificial Sequence
  Description of Artificial Sequence: Synthetic oligonucleotide
gtgaggacgcagggtcttagt

SEQ ID NO: 27612 - DNA, 21 bp, Artificial Sequence
  Description of Artificial Sequence: Synthetic oligonucleotide
gttcggacgcagggtactaat

SEQ ID NO: 27613 - DNA, 21 bp, Artificial Sequence
  Description of Artificial Sequence: Synthetic oligonucleotide
gtgcgtacttctattggtact

SEQ ID NO: 27614 - DNA, 21 bp, Artificial Sequence
  Description of Artificial Sequence: Synthetic oligonucleotide
gttcgtacgtcgccgatgtcg

SEQ ID NO: 27615 - DNA, 21 bp, Artificial Sequence
  Description of Artificial Sequence: Synthetic oligonucleotide
gttcgggttgctgtgcctatg

SEQ ID NO: 27616 - DNA, 21 bp, Artificial Sequence
  Description of Artificial Sequence: Synthetic oligonucleotide
gttcgggtggggacgattggt

SEQ ID NO: 27617 - DNA, 21 bp, Artificial Sequence
  Description of Artificial Sequence: Synthetic oligonucleotide
gtgcgggtgggtactttgaat

SEQ ID NO: 27618 - DNA, 21 bp, Artificial Sequence
  Description of Artificial Sequence: Synthetic oligonucleotide
gttcgtgtgatgggttctagt

SEQ ID NO: 27619 - DNA, 21 bp, Artificial Sequence
  Description of Artificial Sequence: Synthetic oligonucleotide
gtttctgcggcttctttgact

SEQ ID NO: 27620 - DNA, 21 bp, Artificial Sequence
  Description of Artificial Sequence: Synthetic oligonucleotide
gttagtgcggctacgtctttt

SEQ ID NO: 27621 - DNA, 21 bp, Artificial Sequence
  Description of Artificial Sequence: Synthetic oligonucleotide
gtgtctgcgcatactaattct

SEQ ID NO: 27622 - DNA, 21 bp, Artificial Sequence
  Description of Artificial Sequence: Synthetic oligonucleotide
gtgagtgcgattatggatgtg

SEQ ID NO: 27623 - DNA, 21 bp, Artificial Sequence
  Description of Artificial Sequence: Synthetic oligonucleotide
gtgtcggctatttctgctact

SEQ ID NO: 27624 - DNA, 21 bp, Artificial Sequence
  Description of Artificial Sequence: Synthetic oligonucleotide
gtgagtgctcctgaggatcat

SEQ ID NO: 27625 - DNA, 21 bp, Artificial Sequence
  Description of Artificial Sequence: Synthetic oligonucleotide
gtgtctgctcagattagtatt

SEQ ID NO: 27626 - DNA, 21 bp, Artificial Sequence
  Description of Artificial Sequence: Synthetic oligonucleotide
gtttctgcgcgggagagtgtt

SEQ ID NO: 27627 - DNA, 21 bp, Artificial Sequence
  Description of Artificial Sequence: Synthetic oligonucleotide
gtgtcggctaggtcttttcag

SEQ ID NO: 27628 - DNA, 21 bp, Artificial Sequence
  Description of Artificial Sequence: Synthetic oligonucleotide
gtttctgctagtgctgggcgt

SEQ ID NO: 27629 - DNA, 21 bp, Artificial Sequence
  Description of Artificial Sequence: Synthetic oligonucleotide
gtttctgcgagtcttgctctg

SEQ ID NO: 27630 - DNA, 21 bp, Artificial Sequence
  Description of Artificial Sequence: Synthetic oligonucleotide
gtttctgctagttctagtgct

SEQ ID NO: 27631 - DNA, 21 bp, Artificial Sequence
  Description of Artificial Sequence: Synthetic oligonucleotide
gtgtctgcgacgcatgttcag

SEQ ID NO: 27632 - DNA, 21 bp, Artificial Sequence
  Description of Artificial Sequence: Synthetic oligonucleotide
gtgagtgcgactacgtcggtg

SEQ ID NO: 27633 - DNA, 21 bp, Artificial Sequence
  Description of Artificial Sequence: Synthetic oligonucleotide
gtttcggatgataagagttct

SEQ ID NO: 27634 - DNA, 21 bp, Artificial Sequence
  Description of Artificial Sequence: Synthetic oligonucleotide
gtttctgatggtaataagttg

SEQ ID NO: 27635 - DNA, 21 bp, Artificial Sequence
  Description of Artificial Sequence: Synthetic oligonucleotide
gtgtcggataatctttggtct

SEQ ID NO: 27636 - DNA, 21 bp, Artificial Sequence
  Description of Artificial Sequence: Synthetic oligonucleotide
gtgtcggattcttatcagtgg

SEQ ID NO: 27637 - DNA, 21 bp, Artificial Sequence
  Description of Artificial Sequence: Synthetic oligonucleotide
gtttctgatgtggctttttat

SEQ ID NO: 27638 - DNA, 21 bp, Artificial Sequence
  Description of Artificial Sequence: Synthetic oligonucleotide
gtttctgatgttacgtcggat

SEQ ID NO: 27639 - DNA, 21 bp, Artificial Sequence
  Description of Artificial Sequence: Synthetic oligonucleotide
gtgagtgattatcttactcag

SEQ ID NO: 27640 - DNA, 21 bp, Artificial Sequence
  Description of Artificial Sequence: Synthetic oligonucleotide
gtttcgtttccgtatgaggag

SEQ ID NO: 27641 - DNA, 21 bp, Artificial Sequence
  Description of Artificial Sequence: Synthetic oligonucleotide
gtttcgtttcagcctcttggt

SEQ ID NO: 27642 - DNA, 21 bp, Artificial Sequence
  Description of Artificial Sequence: Synthetic oligonucleotide
gtgagtggttttaatcagcat

SEQ ID NO: 27643 - DNA, 21 bp, Artificial Sequence
  Description of Artificial Sequence: Synthetic oligonucleotide
gtttctgggcctaatcattat

SEQ ID NO: 27644 - DNA, 21 bp, Artificial Sequence
  Description of Artificial Sequence: Synthetic oligonucleotide
gtgagtggttcgctgcagtat

SEQ ID NO: 27645 - DNA, 21 bp, Artificial Sequence
  Description of Artificial Sequence: Synthetic oligonucleotide
gtgagtggtagtacgcggact

SEQ ID NO: 27646 - DNA, 21 bp, Artificial Sequence
  Description of Artificial Sequence: Synthetic oligonucleotide
gttagtcatgctacgcatcag

SEQ ID NO: 27647 - DNA, 21 bp, Artificial Sequence
  Description of Artificial Sequence: Synthetic oligonucleotide
gtgagtcatggtatgaatatg

SEQ ID NO: 27648 - DNA, 21 bp, Artificial Sequence
  Description of Artificial Sequence: Synthetic oligonucleotide
gtgagtcatggtatgtcgtct

SEQ ID NO: 27649 - DNA, 21 bp, Artificial Sequence
  Description of Artificial Sequence: Synthetic oligonucleotide
gttagtcatccgaatgcgccg

SEQ ID NO: 27650 - DNA, 21 bp, Artificial Sequence
  Description of Artificial Sequence: Synthetic oligonucleotide
gtttcgcatactatgcaggag

SEQ ID NO: 27651 - DNA, 21 bp, Artificial Sequence
  Description of Artificial Sequence: Synthetic oligonucleotide
gtttcgattgcgggggcttct

SEQ ID NO: 27652 - DNA, 21 bp, Artificial Sequence
  Description of Artificial Sequence: Synthetic oligonucleotide
gtgtctatttcgattccgtcg

SEQ ID NO: 27653 - DNA, 21 bp, Artificial Sequence
  Description of Artificial Sequence: Synthetic oligonucleotide
gtgtcgatttctatgcctcct

SEQ ID NO: 27654 - DNA, 21 bp, Artificial Sequence
  Description of Artificial Sequence: Synthetic oligonucleotide
gtgagtaaggagatgattctt

SEQ ID NO: 27655 - DNA, 21 bp, Artificial Sequence
  Description of Artificial Sequence: Synthetic oligonucleotide
gtttctaagcctactaattct

SEQ ID NO: 27656 - DNA, 21 bp, Artificial Sequence
  Description of Artificial Sequence: Synthetic oligonucleotide
gttagtaagtctatttcgagt

SEQ ID NO: 27657 - DNA, 21 bp, Artificial Sequence
  Description of Artificial Sequence: Synthetic oligonucleotide
gttagtcttgggtatccggat

SEQ ID NO: 27658 - DNA, 21 bp, Artificial Sequence
  Description of Artificial Sequence: Synthetic oligonucleotide
gtgtcgctgttgcctacgtcg

SEQ ID NO: 27659 - DNA, 21 bp, Artificial Sequence
  Description of Artificial Sequence: Synthetic oligonucleotide
gtgagtctgttgactagtaag

SEQ ID NO: 27660 - DNA, 21 bp, Artificial Sequence
  Description of Artificial Sequence: Synthetic oligonucleotide
gtgtcgctgcctcaggagcgg

SEQ ID NO: 27661 - DNA, 21 bp, Artificial Sequence
  Description of Artificial Sequence: Synthetic oligonucleotide
gtttctctgcaggggattgat

SEQ ID NO: 27662 - DNA, 21 bp, Artificial Sequence
  Description of Artificial Sequence: Synthetic oligonucleotide
gtttctcttcgggcgcctact

SEQ ID NO: 27663 - DNA, 21 bp, Artificial Sequence
  Description of Artificial Sequence: Synthetic oligonucleotide
gtttctctgcggcatacggcg

SEQ ID NO: 27664 - DNA, 21 bp, Artificial Sequence
  Description of Artificial Sequence: Synthetic oligonucleotide
gtttctctgtcgccgatttct

SEQ ID NO: 27665 - DNA, 21 bp, Artificial Sequence
  Description of Artificial Sequence: Synthetic oligonucleotide
gtgtcgctttcgactactgct

SEQ ID NO: 27666 - DNA, 21 bp, Artificial Sequence
  Description of Artificial Sequence: Synthetic oligonucleotide
gtgtcgctgacgctgtctagt

SEQ ID NO: 27667 - DNA, 21 bp, Artificial Sequence
  Description of Artificial Sequence: Synthetic oligonucleotide
gtttcgatgggtcggccgttg

SEQ ID NO: 27668 - DNA, 21 bp, Artificial Sequence
  Description of Artificial Sequence: Synthetic oligonucleotide
gtttctatgcatttggagccg

SEQ ID NO: 27669 - DNA, 21 bp, Artificial Sequence
  Description of Artificial Sequence: Synthetic oligonucleotide
gtgtctatgaagaatcttcat

SEQ ID NO: 27670 - DNA, 21 bp, Artificial Sequence
  Description of Artificial Sequence: Synthetic oligonucleotide
gtttcgatgatggagccggag

SEQ ID NO: 27671 - DNA, 21 bp, Artificial Sequence
  Description of Artificial Sequence: Synthetic oligonucleotide
gttagtatgccttctaggagt

SEQ ID NO: 27672 - DNA, 21 bp, Artificial Sequence
  Description of Artificial Sequence: Synthetic oligonucleotide
gtttcgaatgctgctaggatg

SEQ ID NO: 27673 - DNA, 21 bp, Artificial Sequence
  Description of Artificial Sequence: Synthetic oligonucleotide
gtgtcgaattttcagaatcct

SEQ ID NO: 27674 - DNA, 21 bp, Artificial Sequence
  Description of Artificial Sequence: Synthetic oligonucleotide
gtgtcgaatatttctagtccg

SEQ ID NO: 27675 - DNA, 21 bp, Artificial Sequence
  Description of Artificial Sequence: Synthetic oligonucleotide
gtttctaatatgcagtttgcg

SEQ ID NO: 27676 - DNA, 21 bp, Artificial Sequence
  Description of Artificial Sequence: Synthetic oligonucleotide
gtgtcgaatcctgatttgatg

SEQ ID NO: 27677 - DNA, 21 bp, Artificial Sequence
  Description of Artificial Sequence: Synthetic oligonucleotide
gtgtcgaatcctcaggtgagt

SEQ ID NO: 27678 - DNA, 21 bp, Artificial Sequence
  Description of Artificial Sequence: Synthetic oligonucleotide
gtttctaatcaggctgggtat

SEQ ID NO: 27679 - DNA, 21 bp, Artificial Sequence
  Description of Artificial Sequence: Synthetic oligonucleotide
gtgtcgaatcagaagcaggtt

SEQ ID NO: 27680 - DNA, 21 bp, Artificial Sequence
  Description of Artificial Sequence: Synthetic oligonucleotide
gtttctaatcgttctactcag

SEQ ID NO: 27681 - DNA, 21 bp, Artificial Sequence
  Description of Artificial Sequence: Synthetic oligonucleotide
gttagtaattcgatggcgcat

SEQ ID NO: 27682 - DNA, 21 bp, Artificial Sequence
  Description of Artificial Sequence: Synthetic oligonucleotide
gtgtctaatacgttgctggtg

SEQ ID NO: 27683 - DNA, 21 bp, Artificial Sequence
  Description of Artificial Sequence: Synthetic oligonucleotide
gtgtctcctgcttttcataag

SEQ ID NO: 27684 - DNA, 21 bp, Artificial Sequence
  Description of Artificial Sequence: Synthetic oligonucleotide
gtttctcctgcgtggcatggg

SEQ ID NO: 27685 - DNA, 21 bp, Artificial Sequence
  Description of Artificial Sequence: Synthetic oligonucleotide
gttagtccggaggaggatcgg

SEQ ID NO: 27686 - DNA, 21 bp, Artificial Sequence
  Description of Artificial Sequence: Synthetic oligonucleotide
gtgtctcctgagcctttgcgg

SEQ ID NO: 27687 - DNA, 21 bp, Artificial Sequence
  Description of Artificial Sequence: Synthetic oligonucleotide
gtttcgccggggaatccggcg

SEQ ID NO: 27688 - DNA, 21 bp, Artificial Sequence
  Description of Artificial Sequence: Synthetic oligonucleotide
gtgagtccgcatccggtgcat

SEQ ID NO: 27689 - DNA, 21 bp, Artificial Sequence
  Description of Artificial Sequence: Synthetic oligonucleotide
gtgtctccgctgctgccgagt

SEQ ID NO: 27690 - DNA, 21 bp, Artificial Sequence
  Description of Artificial Sequence: Synthetic oligonucleotide
gtttctcctcttaatacttct

SEQ ID NO: 27691 - DNA, 21 bp, Artificial Sequence
  Description of Artificial Sequence: Synthetic oligonucleotide
gttagtccgatgacggagatt

SEQ ID NO: 27692 - DNA, 21 bp, Artificial Sequence
  Description of Artificial Sequence: Synthetic oligonucleotide
gtgagtccgcgtccggggcag

SEQ ID NO: 27693 - DNA, 21 bp, Artificial Sequence
  Description of Artificial Sequence: Synthetic oligonucleotide
gtgagtccttcgaataggggg

SEQ ID NO: 27694 - DNA, 21 bp, Artificial Sequence
  Description of Artificial Sequence: Synthetic oligonucleotide
gtttctcctagttctgctctt

SEQ ID NO: 27695 - DNA, 21 bp, Artificial Sequence
  Description of Artificial Sequence: Synthetic oligonucleotide
gtgtctccgacgcagcatttt

SEQ ID NO: 27696 - DNA, 21 bp, Artificial Sequence
  Description of Artificial Sequence: Synthetic oligonucleotide
gtgtcgcctacttattctttg

SEQ ID NO: 27697 - DNA, 21 bp, Artificial Sequence
  Description of Artificial Sequence: Synthetic oligonucleotide
gttagtccggtttatacgtcg

SEQ ID NO: 27698 - DNA, 21 bp, Artificial Sequence
  Description of Artificial Sequence: Synthetic oligonucleotide
gtttcgccttatcctcgggat

SEQ ID NO: 27699 - DNA, 21 bp, Artificial Sequence
  Description of Artificial Sequence: Synthetic oligonucleotide
gtgagtcagcttgggagtccg

SEQ ID NO: 27700 - DNA, 21 bp, Artificial Sequence
  Description of Artificial Sequence: Synthetic oligonucleotide
gtgtctcagttgacgcaggtg

SEQ ID NO: 27701 - DNA, 21 bp, Artificial Sequence
  Description of Artificial Sequence: Synthetic oligonucleotide
gtgtcgcagccttcttatggt

SEQ ID NO: 27702 - DNA, 21 bp, Artificial Sequence
  Description of Artificial Sequence: Synthetic oligonucleotide
gtttctcagtcttatacgaat

SEQ ID NO: 27703 - DNA, 21 bp, Artificial Sequence
  Description of Artificial Sequence: Synthetic oligonucleotide
gtgtctcaggtgaagcagggt

SEQ ID NO: 27704 - DNA, 21 bp, Artificial Sequence
  Description of Artificial Sequence: Synthetic oligonucleotide
gtgtcgcgtgctactccgaat

SEQ ID NO: 27705 - DNA, 21 bp, Artificial Sequence
  Description of Artificial Sequence: Synthetic oligonucleotide
gtttcgcgggagattaattct

SEQ ID NO: 27706 - DNA, 21 bp, Artificial Sequence
  Description of Artificial Sequence: Synthetic oligonucleotide
gtgtcgaggcaggattctctg

SEQ ID NO: 27707 - DNA, 21 bp, Artificial Sequence
  Description of Artificial Sequence: Synthetic oligonucleotide
gtttcgcggagtggtaatagt

SEQ ID NO: 27708 - DNA, 21 bp, Artificial Sequence
  Description of Artificial Sequence: Synthetic oligonucleotide
gtttctcggacgatggatact

SEQ ID NO: 27709 - DNA, 21 bp, Artificial Sequence
  Description of Artificial Sequence: Synthetic oligonucleotide
gtttctagggtggagttggct

SEQ ID NO: 27710 - DNA, 21 bp, Artificial Sequence
  Description of Artificial Sequence: Synthetic oligonucleotide
gtttcgtctgctcatagtatt

SEQ ID NO: 27711 - DNA, 21 bp, Artificial Sequence
  Description of Artificial Sequence: Synthetic oligonucleotide
gtttcgtctgctcatacgtct

SEQ ID NO: 27712 - DNA, 21 bp, Artificial Sequence
  Description of Artificial Sequence: Synthetic oligonucleotide
gtttcgtcggctattagttat

SEQ ID NO: 27713 - DNA, 21 bp, Artificial Sequence
  Description of Artificial Sequence: Synthetic oligonucleotide
gttagttcggcgcggggtacg

SEQ ID NO: 27714 - DNA, 21 bp, Artificial Sequence
  Description of Artificial Sequence: Synthetic oligonucleotide
gtttcgtctgcttcgcctatg

SEQ ID NO: 27715 - DNA, 21 bp, Artificial Sequence
  Description of Artificial Sequence: Synthetic oligonucleotide
gtgtcttcggataggctgttg

SEQ ID NO: 27716 - DNA, 21 bp, Artificial Sequence
  Description of Artificial Sequence: Synthetic oligonucleotide
gtttcgtcggattattcgaat

SEQ ID NO: 27717 - DNA, 21 bp, Artificial Sequence
  Description of Artificial Sequence: Synthetic oligonucleotide
gttagttcgtttcttgaggat

SEQ ID NO: 27718 - DNA, 21 bp, Artificial Sequence
  Description of Artificial Sequence: Synthetic oligonucleotide
gttagttcgctggagcttgct

SEQ ID NO: 27719 - DNA, 21 bp, Artificial Sequence
  Description of Artificial Sequence: Synthetic oligonucleotide
gtgagttcgcttaagacttat

SEQ ID NO: 27720 - DNA, 21 bp, Artificial Sequence
  Description of Artificial Sequence: Synthetic oligonucleotide
gtgtcgtctctgcgtggtccg

SEQ ID NO: 27721 - DNA, 21 bp, Artificial Sequence
  Description of Artificial Sequence: Synthetic oligonucleotide
gtttcttctctgagtagtttg

SEQ ID NO: 27722 - DNA, 21 bp, Artificial Sequence
  Description of Artificial Sequence: Synthetic oligonucleotide
gtttcgtctatgctggatgcg

SEQ ID NO: 27723 - DNA, 21 bp, Artificial Sequence
  Description of Artificial Sequence: Synthetic oligonucleotide
gtgtcgagtatgaatattgtt

SEQ ID NO: 27724 - DNA, 21 bp, Artificial Sequence
  Description of Artificial Sequence: Synthetic oligonucleotide
gttagttctatgcctgtgcct

SEQ ID NO: 27725 - DNA, 21 bp, Artificial Sequence
  Description of Artificial Sequence: Synthetic oligonucleotide
gtttcgagtaattcgtttgcg

SEQ ID NO: 27726 - DNA, 21 bp, Artificial Sequence
  Description of Artificial Sequence: Synthetic oligonucleotide
gtgtcgtctcctgatagtaat

SEQ ID NO: 27727 - DNA, 21 bp, Artificial Sequence
  Description of Artificial Sequence: Synthetic oligonucleotide
gtttcttctcctttgagtggt

SEQ ID NO: 27728 - DNA, 21 bp, Artificial Sequence
  Description of Artificial Sequence: Synthetic oligonucleotide
gtgtcttctcctcctgatctt

SEQ ID NO: 27729 - DNA, 21 bp, Artificial Sequence
  Description of Artificial Sequence: Synthetic oligonucleotide
gttagttcgcctcgggagcat

SEQ ID NO: 27730 - DNA, 21 bp, Artificial Sequence
  Description of Artificial Sequence: Synthetic oligonucleotide
gtttcgtcgcagaatgttttt

SEQ ID NO: 27731 - DNA, 21 bp, Artificial Sequence
  Description of Artificial Sequence: Synthetic oligonucleotide
gttagttcgcagaggaatggg

SEQ ID NO: 27732 - DNA, 21 bp, Artificial Sequence
  Description of Artificial Sequence: Synthetic oligonucleotide
gtgtcgtcgcgttatcatgct

SEQ ID NO: 27733 - DNA, 21 bp, Artificial Sequence
  Description of Artificial Sequence: Synthetic oligonucleotide
gtgagtagtagtggtatgacg

SEQ ID NO: 27734 - DNA, 21 bp, Artificial Sequence
  Description of Artificial Sequence: Synthetic oligonucleotide
gtgtcttcgtcgcttatgtcg

SEQ ID NO: 27735 - DNA, 21 bp, Artificial Sequence
  Description of Artificial Sequence: Synthetic oligonucleotide
gtttcttctagtcagatgcct

SEQ ID NO: 27736 - DNA, 21 bp, Artificial Sequence
  Description of Artificial Sequence: Synthetic oligonucleotide
gtttcttcttcggttcttagg

SEQ ID NO: 27737 - DNA, 21 bp, Artificial Sequence
  Description of Artificial Sequence: Synthetic oligonucleotide
gtgtcgagtactattgtgatg

SEQ ID NO: 27738 - DNA, 21 bp, Artificial Sequence
  Description of Artificial Sequence: Synthetic oligonucleotide
gtgtcgtctgtggtgtcgggt

SEQ ID NO: 27739 - DNA, 21 bp, Artificial Sequence
  Description of Artificial Sequence: Synthetic oligonucleotide
gtgtctactgctcatcagtcg

SEQ ID NO: 27740 - DNA, 21 bp, Artificial Sequence
  Description of Artificial Sequence: Synthetic oligonucleotide
gtttcgacgtttggtcctacg

SEQ ID NO: 27741 - DNA, 21 bp, Artificial Sequence
  Description of Artificial Sequence: Synthetic oligonucleotide
gttagtacgggtttgacgaag

SEQ ID NO: 27742 - DNA, 21 bp, Artificial Sequence
  Description of Artificial Sequence: Synthetic oligonucleotide
gtttcgactggttatgctgtt

SEQ ID NO: 27743 - DNA, 21 bp, Artificial Sequence
  Description of Artificial Sequence: Synthetic oligonucleotide
gtttctacgattgcgtttgag

SEQ ID NO: 27744 - DNA, 21 bp, Artificial Sequence
  Description of Artificial Sequence: Synthetic oligonucleotide
gtgtctacgatttcgtcgttg

SEQ ID NO: 27745 - DNA, 21 bp, Artificial Sequence
  Description of Artificial Sequence: Synthetic oligonucleotide
gtttctacgcttcaggcgggg

SEQ ID NO: 27746 - DNA, 21 bp, Artificial Sequence
  Description of Artificial Sequence: Synthetic oligonucleotide
gtttcgactatgcggagtccg

SEQ ID NO: 27747 - DNA, 21 bp, Artificial Sequence
  Description of Artificial Sequence: Synthetic oligonucleotide
gttagtactcctaataataag

SEQ ID NO: 27748 - DNA, 21 bp, Artificial Sequence
  Description of Artificial Sequence: Synthetic oligonucleotide
gtgagtacgcagacttataag

SEQ ID NO: 27749 - DNA, 21 bp, Artificial Sequence
  Description of Artificial Sequence: Synthetic oligonucleotide
gtgtcgacgaggcagcttctt

SEQ ID NO: 27750 - DNA, 21 bp, Artificial Sequence
  Description of Artificial Sequence: Synthetic oligonucleotide
gtgagtactagtgttctgagg

SEQ ID NO: 27751 - DNA, 21 bp, Artificial Sequence
  Description of Artificial Sequence: Synthetic oligonucleotide
gtgagtacgacgtttaaggtg

SEQ ID NO: 27752 - DNA, 21 bp, Artificial Sequence
  Description of Artificial Sequence: Synthetic oligonucleotide
gtttcggttaaggtgcatgat

SEQ ID NO: 27753 - DNA, 21 bp, Artificial Sequence
  Description of Artificial Sequence: Synthetic oligonucleotide
gtttctgtgcagtcgtcgcgg

SEQ ID NO: 27754 - DNA, 21 bp, Artificial Sequence
  Description of Artificial Sequence: Synthetic oligonucleotide
gtgtcggtgtcgacgcatcat

SEQ ID NO: 27755 - DNA, 21 bp, Artificial Sequence
  Description of Artificial Sequence: Synthetic oligonucleotide
gtttcggttagtgtgggtgag

SEQ ID NO: 27756 - DNA, 21 bp, Artificial Sequence
  Description of Artificial Sequence: Synthetic oligonucleotide
gtttctgttactgcgggtggg

SEQ ID NO: 27757 - DNA, 21 bp, Artificial Sequence
  Description of Artificial Sequence: Synthetic oligonucleotide
gtttctgttacttctgctggt

SEQ ID NO: 27758 - DNA, 21 bp, Artificial Sequence
  Description of Artificial Sequence: Synthetic oligonucleotide
gtgtcttatgctatggagaat

SEQ ID NO: 27759 - DNA, 21 bp, Artificial Sequence
  Description of Artificial Sequence: Synthetic oligonucleotide
gtgtcgtatccggctcaggct

SEQ ID NO: 27760 - DNA, 21 bp, Artificial Sequence
  Description of Artificial Sequence: Synthetic oligonucleotide
gtgactgctgggcctatgcgt

SEQ ID NO: 27761 - DNA, 21 bp, Artificial Sequence
  Description of Artificial Sequence: Synthetic oligonucleotide
gtgactgcgcttactattgct

SEQ ID NO: 27762 - DNA, 21 bp, Artificial Sequence
  Description of Artificial Sequence: Synthetic oligonucleotide
gtgactgctctggttaaggat

SEQ ID NO: 27763 - DNA, 21 bp, Artificial Sequence
  Description of Artificial Sequence: Synthetic oligonucleotide
gtgactgctaatttgcctcag

SEQ ID NO: 27764 - DNA, 21 bp, Artificial Sequence
  Description of Artificial Sequence: Synthetic oligonucleotide
gttactgctaatgttcttcct

SEQ ID NO: 27765 - DNA, 21 bp, Artificial Sequence
  Description of Artificial Sequence: Synthetic oligonucleotide
gttactgctccggtgactggt

SEQ ID NO: 27766 - DNA, 21 bp, Artificial Sequence
  Description of Artificial Sequence: Synthetic oligonucleotide
gttactgcgcagtcgtcggtg

SEQ ID NO: 27767 - DNA, 21 bp, Artificial Sequence
  Description of Artificial Sequence: Synthetic oligonucleotide
gtgactgcgcgttctctggct

SEQ ID NO: 27768 - DNA, 21 bp, Artificial Sequence
  Description of Artificial Sequence: Synthetic oligonucleotide
gtgactgctagtcatcgtgtt

SEQ ID NO: 27769 - DNA, 21 bp, Artificial Sequence
  Description of Artificial Sequence: Synthetic oligonucleotide
gttactgatgctgtgactacg

SEQ ID NO: 27770 - DNA, 21 bp, Artificial Sequence
  Description of Artificial Sequence: Synthetic oligonucleotide
gttactgataatgtgcggaat

SEQ ID NO: 27771 - DNA, 21 bp, Artificial Sequence
  Description of Artificial Sequence: Synthetic oligonucleotide
gtgactgattcgactgatgat

SEQ ID NO: 27772 - DNA, 21 bp, Artificial Sequence
  Description of Artificial Sequence: Synthetic oligonucleotide
gttacggatacgcgtgagagg

SEQ ID NO: 27773 - DNA, 21 bp, Artificial Sequence
  Description of Artificial Sequence: Synthetic oligonucleotide
gttacggaggcgcgttctgcg

SEQ ID NO: 27774 - DNA, 21 bp, Artificial Sequence
  Description of Artificial Sequence: Synthetic oligonucleotide
gtgacggaggagagtgatatg

SEQ ID NO: 27775 - DNA, 21 bp, Artificial Sequence
  Description of Artificial Sequence: Synthetic oligonucleotide
gttacggaggagtctaatact

SEQ ID NO: 27776 - DNA, 21 bp, Artificial Sequence
  Description of Artificial Sequence: Synthetic oligonucleotide
gttacggagcatctgaagaat

SEQ ID NO: 27777 - DNA, 21 bp, Artificial Sequence
  Description of Artificial Sequence: Synthetic oligonucleotide
gttactgagaggatgactctt

SEQ ID NO: 27778 - DNA, 21 bp, Artificial Sequence
  Description of Artificial Sequence: Synthetic oligonucleotide
gttacgttttcttcttctggt

SEQ ID NO: 27779 - DNA, 21 bp, Artificial Sequence
  Description of Artificial Sequence: Synthetic oligonucleotide
gttactggggcgcggttggct

SEQ ID NO: 27780 - DNA, 21 bp, Artificial Sequence
  Description of Artificial Sequence: Synthetic oligonucleotide
gttactggtcatgcgattctt

SEQ ID NO: 27781 - DNA, 21 bp, Artificial Sequence
  Description of Artificial Sequence: Synthetic oligonucleotide
gttactggtaagccttctttg

SEQ ID NO: 27782 - DNA, 21 bp, Artificial Sequence
  Description of Artificial Sequence: Synthetic oligonucleotide
gttactgggccgggtttgagg

SEQ ID NO: 27783 - DNA, 21 bp, Artificial Sequence
  Description of Artificial Sequence: Synthetic oligonucleotide
gtgacggggacgaggactgtg

SEQ ID NO: 27784 - DNA, 21 bp, Artificial Sequence
  Description of Artificial Sequence: Synthetic oligonucleotide
gttacgcatcttatgcagggg

SEQ ID NO: 27785 - DNA, 21 bp, Artificial Sequence
  Description of Artificial Sequence: Synthetic oligonucleotide
gttacgcatcctaatttgagt

SEQ ID NO: 27786 - DNA, 21 bp, Artificial Sequence
  Description of Artificial Sequence: Synthetic oligonucleotide
gtgactcatacggagtttccg

SEQ ID NO: 27787 - DNA, 21 bp, Artificial Sequence
  Description of Artificial Sequence: Synthetic oligonucleotide
gtgactcatactggtcataag

SEQ ID NO: 27788 - DNA, 21 bp, Artificial Sequence
  Description of Artificial Sequence: Synthetic oligonucleotide
gtgacgcattatagttcggtg

SEQ ID NO: 27789 - DNA, 21 bp, Artificial Sequence
  Description of Artificial Sequence: Synthetic oligonucleotide
gtgactattgatgattatcct

SEQ ID NO: 27790 - DNA, 21 bp, Artificial Sequence
  Description of Artificial Sequence: Synthetic oligonucleotide
gttacgaaggcttctgctcct

SEQ ID NO: 27791 - DNA, 21 bp, Artificial Sequence
  Description of Artificial Sequence: Synthetic oligonucleotide
gttactttgaagcctttgagt

SEQ ID NO: 27792 - DNA, 21 bp, Artificial Sequence
  Description of Artificial Sequence: Synthetic oligonucleotide
gtgactcttctggcgtcgagg

SEQ ID NO: 27793 - DNA, 21 bp, Artificial Sequence
  Description of Artificial Sequence: Synthetic oligonucleotide
gtgactttgccgcttactcgt

SEQ ID NO: 27794 - DNA, 21 bp, Artificial Sequence
  Description of Artificial Sequence: Synthetic oligonucleotide
gttactctgcagcgtcctggg

SEQ ID NO: 27795 - DNA, 21 bp, Artificial Sequence
  Description of Artificial Sequence: Synthetic oligonucleotide
gtgacgctgagtgctgagggg

SEQ ID NO: 27796 - DNA, 21 bp, Artificial Sequence
  Description of Artificial Sequence: Synthetic oligonucleotide
gtgactctgtcggataggctg

SEQ ID NO: 27797 - DNA, 21 bp, Artificial Sequence
  Description of Artificial Sequence: Synthetic oligonucleotide
gttactatgagtactattcgt

SEQ ID NO: 27798 - DNA, 21 bp, Artificial Sequence
  Description of Artificial Sequence: Synthetic oligonucleotide
gtgacgaatagggtgcatcct

SEQ ID NO: 27799 - DNA, 21 bp, Artificial Sequence
  Description of Artificial Sequence: Synthetic oligonucleotide
gttactccggatctgcgtcat

SEQ ID NO: 27800 - DNA, 21 bp, Artificial Sequence
  Description of Artificial Sequence: Synthetic oligonucleotide
gttactccggattcgctgaag

SEQ ID NO: 27801 - DNA, 21 bp, Artificial Sequence
  Description of Artificial Sequence: Synthetic oligonucleotide
gttactcctgattataggaat

SEQ ID NO: 27802 - DNA, 21 bp, Artificial Sequence
  Description of Artificial Sequence: Synthetic oligonucleotide
gtgactccgggtcttgcttat

SEQ ID NO: 27803 - DNA, 21 bp, Artificial Sequence
  Description of Artificial Sequence: Synthetic oligonucleotide
gtgacgcctctgcttacggcg

SEQ ID NO: 27804 - DNA, 21 bp, Artificial Sequence
  Description of Artificial Sequence: Synthetic oligonucleotide
gtgacgcctcagacgaatttt

SEQ ID NO: 27805 - DNA, 21 bp, Artificial Sequence
  Description of Artificial Sequence: Synthetic oligonucleotide
gtgactccggttgggaagacg

SEQ ID NO: 27806 - DNA, 21 bp, Artificial Sequence
  Description of Artificial Sequence: Synthetic oligonucleotide
gttacgcagcatacttctacg

SEQ ID NO: 27807 - DNA, 21 bp, Artificial Sequence
  Description of Artificial Sequence: Synthetic oligonucleotide
gtgactcagattctgaggact

SEQ ID NO: 27808 - DNA, 21 bp, Artificial Sequence
  Description of Artificial Sequence: Synthetic oligonucleotide
gtgacgcagccgcatgcttct

SEQ ID NO: 27809 - DNA, 21 bp, Artificial Sequence
  Description of Artificial Sequence: Synthetic oligonucleotide
gttacgcgtgcgttgcatgat

SEQ ID NO: 27810 - DNA, 21 bp, Artificial Sequence
  Description of Artificial Sequence: Synthetic oligonucleotide
gttactcgtatggagtctgct

SEQ ID NO: 27811 - DNA, 21 bp, Artificial Sequence
  Description of Artificial Sequence: Synthetic oligonucleotide
gttacgtcggctcttgtgcgt

SEQ ID NO: 27812 - DNA, 21 bp, Artificial Sequence
  Description of Artificial Sequence: Synthetic oligonucleotide
gtgacttctgctatgcagggt

SEQ ID NO: 27813 - DNA, 21 bp, Artificial Sequence
  Description of Artificial Sequence: Synthetic oligonucleotide
gtgacgtctgcgtctacgcat

SEQ ID NO: 27814 - DNA, 21 bp, Artificial Sequence
  Description of Artificial Sequence: Synthetic oligonucleotide
gtgacttcttttgtggctccg

SEQ ID NO: 27815 - DNA, 21 bp, Artificial Sequence
  Description of Artificial Sequence: Synthetic oligonucleotide
gtgacttcgcatactggggag

SEQ ID NO: 27816 - DNA, 21 bp, Artificial Sequence
  Description of Artificial Sequence: Synthetic oligonucleotide
gttacttcgccgacgtttgag

SEQ ID NO: 27817 - DNA, 21 bp, Artificial Sequence
  Description of Artificial Sequence: Synthetic oligonucleotide
gttactagtcggtcggctgtt

SEQ ID NO: 27818 - DNA, 21 bp, Artificial Sequence
  Description of Artificial Sequence: Synthetic oligonucleotide
gtgacgtcgtcgacgcagttg

SEQ ID NO: 27819 - DNA, 21 bp, Artificial Sequence
  Description of Artificial Sequence: Synthetic oligonucleotide
gtgacttcgactagtactaat

SEQ ID NO: 27820 - DNA, 21 bp, Artificial Sequence
  Description of Artificial Sequence: Synthetic oligonucleotide
gtgactagtgtttcgccgatt

SEQ ID NO: 27821 - DNA, 21 bp, Artificial Sequence
  Description of Artificial Sequence: Synthetic oligonucleotide
gttactactgctacggggatt

SEQ ID NO: 27822 - DNA, 21 bp, Artificial Sequence
  Description of Artificial Sequence: Synthetic oligonucleotide
gttacgacggagcctcggttt

SEQ ID NO: 27823 - DNA, 21 bp, Artificial Sequence
  Description of Artificial Sequence: Synthetic oligonucleotide
gtgactacgattcgggctcat

SEQ ID NO: 27824 - DNA, 21 bp, Artificial Sequence
  Description of Artificial Sequence: Synthetic oligonucleotide
gtgactactaagcagacgtgt

SEQ ID NO: 27825 - DNA, 21 bp, Artificial Sequence
  Description of Artificial Sequence: Synthetic oligonucleotide
gttactactaatggtcctatt

SEQ ID NO: 27826 - DNA, 21 bp, Artificial Sequence
  Description of Artificial Sequence: Synthetic oligonucleotide
gtgacgactcagtttgagtct

SEQ ID NO: 27827 - DNA, 21 bp, Artificial Sequence
  Description of Artificial Sequence: Synthetic oligonucleotide
gtgactacgaggccgtatccg

SEQ ID NO: 27828 - DNA, 21 bp, Artificial Sequence
  Description of Artificial Sequence: Synthetic oligonucleotide
gtgacgacgagtcgttatctg

SEQ ID NO: 27829 - DNA, 21 bp, Artificial Sequence
  Description of Artificial Sequence: Synthetic oligonucleotide
gtgactacgagtacttcgcgt

SEQ ID NO: 27830 - DNA, 21 bp, Artificial Sequence
  Description of Artificial Sequence: Synthetic oligonucleotide
gtgacgacgactcagattact

SEQ ID NO: 27831 - DNA, 21 bp, Artificial Sequence
  Description of Artificial Sequence: Synthetic oligonucleotide
gtgacgacggtgattcttgat

SEQ ID NO: 27832 - DNA, 21 bp, Artificial Sequence
  Description of Artificial Sequence: Synthetic oligonucleotide
gttacggttcattcgcatttt

SEQ ID NO: 27833 - DNA, 21 bp, Artificial Sequence
  Description of Artificial Sequence: Synthetic oligonucleotide
gttacggttcctcttccgtcg

SEQ ID NO: 27834 - DNA, 21 bp, Artificial Sequence
  Description of Artificial Sequence: Synthetic oligonucleotide
gttactgtgcagatgaatgtt

SEQ ID NO: 27835 - DNA, 21 bp, Artificial Sequence
  Description of Artificial Sequence: Synthetic oligonucleotide
gtgacggtgagggggtcgatt

SEQ ID NO: 27836 - DNA, 21 bp, Artificial Sequence
  Description of Artificial Sequence: Synthetic oligonucleotide
gttacggtgactgggacgatt

SEQ ID NO: 27837 - DNA, 21 bp, Artificial Sequence
  Description of Artificial Sequence: Synthetic oligonucleotide
gtgacttattcgccgcttggg

SEQ ID NO: 27838 - DNA, 21 bp, Artificial Sequence
  Description of Artificial Sequence: Synthetic oligonucleotide
gtggttgctgggcgtagtagt

SEQ ID NO: 27839 - DNA, 21 bp, Artificial Sequence
  Description of Artificial Sequence: Synthetic oligonucleotide
gtggtggctcagccgggtcat

SEQ ID NO: 27840 - DNA, 21 bp, Artificial Sequence
  Description of Artificial Sequence: Synthetic oligonucleotide
gtggtggctacgacgctgaat

SEQ ID NO: 27841 - DNA, 21 bp, Artificial Sequence
  Description of Artificial Sequence: Synthetic oligonucleotide
gtggtggattctcctcgggct

SEQ ID NO: 27842 - DNA, 21 bp, Artificial Sequence
  Description of Artificial Sequence: Synthetic oligonucleotide
gttgttgatgttcctttgcgg

SEQ ID NO: 27843 - DNA, 21 bp, Artificial Sequence
  Description of Artificial Sequence: Synthetic oligonucleotide
gttgttgagacttttgagccg

SEQ ID NO: 27844 - DNA, 21 bp, Artificial Sequence
  Description of Artificial Sequence: Synthetic oligonucleotide
gtggttggtgatgggacgatt

SEQ ID NO: 27845 - DNA, 21 bp, Artificial Sequence
  Description of Artificial Sequence: Synthetic oligonucleotide
gtggtgggtgatcaggctgat

SEQ ID NO: 27846 - DNA, 21 bp, Artificial Sequence
  Description of Artificial Sequence: Synthetic oligonucleotide
gttgtgggtgggcagttgttg

SEQ ID NO: 27847 - DNA, 21 bp, Artificial Sequence
  Description of Artificial Sequence: Synthetic oligonucleotide
gttgtggggattcgtggggag

SEQ ID NO: 27848 - DNA, 21 bp, Artificial Sequence
  Description of Artificial Sequence: Synthetic oligonucleotide
gttgttgggatgggtacgggt

SEQ ID NO: 27849 - DNA, 21 bp, Artificial Sequence
  Description of Artificial Sequence: Synthetic oligonucleotide
gttgtgggtccgtcgttgccg

SEQ ID NO: 27850 - DNA, 21 bp, Artificial Sequence
  Description of Artificial Sequence: Synthetic oligonucleotide
gttgtgggtcgtcaggagcgg

SEQ ID NO: 27851 - DNA, 21 bp, Artificial Sequence
  Description of Artificial Sequence: Synthetic oligonucleotide
gttgttgggaggtcgaatcct

SEQ ID NO: 27852 - DNA, 21 bp, Artificial Sequence
  Description of Artificial Sequence: Synthetic oligonucleotide
gttgtgggtagtcctactcgg

SEQ ID NO: 27853 - DNA, 21 bp, Artificial Sequence
  Description of Artificial Sequence: Synthetic oligonucleotide
gtggtggggtctagtggtccg

SEQ ID NO: 27854 - DNA, 21 bp, Artificial Sequence
  Description of Artificial Sequence: Synthetic oligonucleotide
gttgttcatccgcctggtcag

SEQ ID NO: 27855 - DNA, 21 bp, Artificial Sequence
  Description of Artificial Sequence: Synthetic oligonucleotide
gttgtgcatccgagtccgggt

SEQ ID NO: 27856 - DNA, 21 bp, Artificial Sequence
  Description of Artificial Sequence: Synthetic oligonucleotide
gttgttcattctaatgagccg

SEQ ID NO: 27857 - DNA, 21 bp, Artificial Sequence
  Description of Artificial Sequence: Synthetic oligonucleotide
gtggtgcatacgatgtctgtt

SEQ ID NO: 27858 - DNA, 21 bp, Artificial Sequence
  Description of Artificial Sequence: Synthetic oligonucleotide
gtggtgcatgtttctcatcct

SEQ ID NO: 27859 - DNA, 21 bp, Artificial Sequence
  Description of Artificial Sequence: Synthetic oligonucleotide
gttgttcatgtggtgaattcg

SEQ ID NO: 27860 - DNA, 21 bp, Artificial Sequence
  Description of Artificial Sequence: Synthetic oligonucleotide
gtggtgattgatcagaatggg

SEQ ID NO: 27861 - DNA, 21 bp, Artificial Sequence
  Description of Artificial Sequence: Synthetic oligonucleotide
gttgttttgaaggataatcat

SEQ ID NO: 27862 - DNA, 21 bp, Artificial Sequence
  Description of Artificial Sequence: Synthetic oligonucleotide
gttgtgatgcgggatgatccg

SEQ ID NO: 27863 - DNA, 21 bp, Artificial Sequence
  Description of Artificial Sequence: Synthetic oligonucleotide
gttgtgaatgcgtctgctaat

SEQ ID NO: 27864 - DNA, 21 bp, Artificial Sequence
  Description of Artificial Sequence: Synthetic oligonucleotide
gttgtgaataatttgaggatt

SEQ ID NO: 27865 - DNA, 21 bp, Artificial Sequence
  Description of Artificial Sequence: Synthetic oligonucleotide
gtggttaatcaggctcagttg

SEQ ID NO: 27866 - DNA, 21 bp, Artificial Sequence
  Description of Artificial Sequence: Synthetic oligonucleotide
gtggttaatacgaaggcgaat

SEQ ID NO: 27867 - DNA, 21 bp, Artificial Sequence
  Description of Artificial Sequence: Synthetic oligonucleotide
gtggtgaatactaagtctggt

SEQ ID NO: 27868 - DNA, 21 bp, Artificial Sequence
  Description of Artificial Sequence: Synthetic oligonucleotide
gtggtgcctgcgctgaagatg

SEQ ID NO: 27869 - DNA, 21 bp, Artificial Sequence
  Description of Artificial Sequence: Synthetic oligonucleotide
gttgttccgcattcgaggcag

SEQ ID NO: 27870 - DNA, 21 bp, Artificial Sequence
  Description of Artificial Sequence: Synthetic oligonucleotide
gtggtgccgttgggtcctgtt

SEQ ID NO: 27871 - DNA, 21 bp, Artificial Sequence
  Description of Artificial Sequence: Synthetic oligonucleotide
gttgttccgcgtgatccgggt

SEQ ID NO: 27872 - DNA, 21 bp, Artificial Sequence
  Description of Artificial Sequence: Synthetic oligonucleotide
gtggtgcctaggatgactggg

SEQ ID NO: 27873 - DNA, 21 bp, Artificial Sequence
  Description of Artificial Sequence: Synthetic oligonucleotide
gttgtgccgcggccgggtatg

SEQ ID NO: 27874 - DNA, 21 bp, Artificial Sequence
  Description of Artificial Sequence: Synthetic oligonucleotide
gttgttccgcgtagtggggat

SEQ ID NO: 27875 - DNA, 21 bp, Artificial Sequence
  Description of Artificial Sequence: Synthetic oligonucleotide
gtggttcctactgatgatggt

SEQ ID NO: 27876 - DNA, 21 bp, Artificial Sequence
  Description of Artificial Sequence: Synthetic oligonucleotide
gtggtgcagcctagggcgggt

SEQ ID NO: 27877 - DNA, 21 bp, Artificial Sequence
  Description of Artificial Sequence: Synthetic oligonucleotide
gtggttcagcagtcgtctctt

SEQ ID NO: 27878 - DNA, 21 bp, Artificial Sequence
  Description of Artificial Sequence: Synthetic oligonucleotide
gtggttcgggcttcgtctgtg

SEQ ID NO: 27879 - DNA, 21 bp, Artificial Sequence
  Description of Artificial Sequence: Synthetic oligonucleotide
gtggtgcgtgggtcgtcggtt

SEQ ID NO: 27880 - DNA, 21 bp, Artificial Sequence
  Description of Artificial Sequence: Synthetic oligonucleotide
gtggtgcggaatgcggggggg

SEQ ID NO: 27881 - DNA, 21 bp, Artificial Sequence
  Description of Artificial Sequence: Synthetic oligonucleotide
gttgttcgtaatgctattaat

SEQ ID NO: 27882 - DNA, 21 bp, Artificial Sequence
  Description of Artificial Sequence: Synthetic oligonucleotide
gttgttcggccttctggtctt

SEQ ID NO: 27883 - DNA, 21 bp, Artificial Sequence
  Description of Artificial Sequence: Synthetic oligonucleotide
gtggtttctgctccgcttgtt

SEQ ID NO: 27884 - DNA, 21 bp, Artificial Sequence
  Description of Artificial Sequence: Synthetic oligonucleotide
gtggtttcgtttgatagggct

SEQ ID NO: 27885 - DNA, 21 bp, Artificial Sequence
  Description of Artificial Sequence: Synthetic oligonucleotide
gtggtgtctgggtctcggccg

SEQ ID NO: 27886 - DNA, 21 bp, Artificial Sequence
  Description of Artificial Sequence: Synthetic oligonucleotide
gttgtttcgcatatttcggtg

SEQ ID NO: 27887 - DNA, 21 bp, Artificial Sequence
  Description of Artificial Sequence: Synthetic oligonucleotide
gtggttagtattgcgagggtt

SEQ ID NO: 27888 - DNA, 21 bp, Artificial Sequence
  Description of Artificial Sequence: Synthetic oligonucleotide
gtggtttcgcagccgtctccg

SEQ ID NO: 27889 - DNA, 21 bp, Artificial Sequence
  Description of Artificial Sequence: Synthetic oligonucleotide
gttgttagtcgtccgatttct

SEQ ID NO: 27890 - DNA, 21 bp, Artificial Sequence
  Description of Artificial Sequence: Synthetic oligonucleotide
gtggtttctcggtcgtataat

SEQ ID NO: 27891 - DNA, 21 bp, Artificial Sequence
  Description of Artificial Sequence: Synthetic oligonucleotide
gttgtttctcgtgttgcgtcg

SEQ ID NO: 27892 - DNA, 21 bp, Artificial Sequence
  Description of Artificial Sequence: Synthetic oligonucleotide
gttgtttcttcgggttcgttg

SEQ ID NO: 27893 - DNA, 21 bp, Artificial Sequence
  Description of Artificial Sequence: Synthetic oligonucleotide
gtggtgtcgtcgtcgttgatg

SEQ ID NO: 27894 - DNA, 21 bp, Artificial Sequence
  Description of Artificial Sequence: Synthetic oligonucleotide
gtggtgagtacgactttgcct

SEQ ID NO: 27895 - DNA, 21 bp, Artificial Sequence
  Description of Artificial Sequence: Synthetic oligonucleotide
gtggtttctgttgcgacttcg

SEQ ID NO: 27896 - DNA, 21 bp, Artificial Sequence
  Description of Artificial Sequence: Synthetic oligonucleotide
gttgttacggattcggggggt

SEQ ID NO: 27897 - DNA, 21 bp, Artificial Sequence
  Description of Artificial Sequence: Synthetic oligonucleotide
gttgtgactagtgcttcgggt

SEQ ID NO: 27898 - DNA, 21 bp, Artificial Sequence
  Description of Artificial Sequence: Synthetic oligonucleotide
gttgttacgactaggattact

SEQ ID NO: 27899 - DNA, 21 bp, Artificial Sequence
  Description of Artificial Sequence: Synthetic oligonucleotide
gtggtggtggctggtagtgag

SEQ ID NO: 27900 - DNA, 21 bp, Artificial Sequence
  Description of Artificial Sequence: Synthetic oligonucleotide
gtttgggctgatgataatgtg

SEQ ID NO: 27901 - DNA, 21 bp, Artificial Sequence
  Description of Artificial Sequence: Synthetic oligonucleotide
gtgtgggctaggggttctgag

SEQ ID NO: 27902 - DNA, 21 bp, Artificial Sequence
  Description of Artificial Sequence: Synthetic oligonucleotide
gtgtggcctgcttcgggtact

SEQ ID NO: 27903 - DNA, 21 bp, Artificial Sequence
  Description of Artificial Sequence: Synthetic oligonucleotide
gtgtggcagccttcgaatgat

SEQ ID NO: 27904 - DNA, 21 bp, Artificial Sequence
  Description of Artificial Sequence: Synthetic oligonucleotide
gtttggtctgggtcttcggat

SEQ ID NO: 27905 - DNA, 21 bp, Artificial Sequence
  Description of Artificial Sequence: Synthetic oligonucleotide
gtttggactcatgagacgtcg

SEQ ID NO: 27906 - DNA, 21 bp, Artificial Sequence
  Description of Artificial Sequence: Synthetic oligonucleotide
gtgtatgcgcctgagaagcgt

SEQ ID NO: 27907 - DNA, 21 bp, Artificial Sequence
  Description of Artificial Sequence: Synthetic oligonucleotide
gtttatgcgacgttgcctgag

SEQ ID NO: 27908 - DNA, 21 bp, Artificial Sequence
  Description of Artificial Sequence: Synthetic oligonucleotide
gtttatgagcctagtaagtat

SEQ ID NO: 27909 - DNA, 21 bp, Artificial Sequence
  Description of Artificial Sequence: Synthetic oligonucleotide
gtttatgagtcgaatcgtttt

SEQ ID NO: 27910 - DNA, 21 bp, Artificial Sequence
  Description of Artificial Sequence: Synthetic oligonucleotide
gtttatgggtattctggtagt

SEQ ID NO: 27911 - DNA, 21 bp, Artificial Sequence
  Description of Artificial Sequence: Synthetic oligonucleotide
gtttatcatccgaatgagttt

SEQ ID NO: 27912 - DNA, 21 bp, Artificial Sequence
  Description of Artificial Sequence: Synthetic oligonucleotide
gtgtatattggtcggcaggag

SEQ ID NO: 27913 - DNA, 21 bp, Artificial Sequence
  Description of Artificial Sequence: Synthetic oligonucleotide
gtttataaggctagtaattat

SEQ ID NO: 27914 - DNA, 21 bp, Artificial Sequence
  Description of Artificial Sequence: Synthetic oligonucleotide
gtttatttgaagagtagtact

SEQ ID NO: 27915 - DNA, 21 bp, Artificial Sequence
  Description of Artificial Sequence: Synthetic oligonucleotide
gtttataatgctggtgttgat

SEQ ID NO: 27916 - DNA, 21 bp, Artificial Sequence
  Description of Artificial Sequence: Synthetic oligonucleotide
gtttataatacttcgactgct

SEQ ID NO: 27917 - DNA, 21 bp, Artificial Sequence
  Description of Artificial Sequence: Synthetic oligonucleotide
gtgtatccgccgagtacgact

SEQ ID NO: 27918 - DNA, 21 bp, Artificial Sequence
  Description of Artificial Sequence: Synthetic oligonucleotide
gtttatccgagggatttgact

SEQ ID NO: 27919 - DNA, 21 bp, Artificial Sequence
  Description of Artificial Sequence: Synthetic oligonucleotide
gtttatcgggatagtactccg

SEQ ID NO: 27920 - DNA, 21 bp, Artificial Sequence
  Description of Artificial Sequence: Synthetic oligonucleotide
gtgtatcgttctcatgagacg

SEQ ID NO: 27921 - DNA, 21 bp, Artificial Sequence
  Description of Artificial Sequence: Synthetic oligonucleotide
gtgtattcgcttggggggctg

SEQ ID NO: 27922 - DNA, 21 bp, Artificial Sequence
  Description of Artificial Sequence: Synthetic oligonucleotide
gtgtattctaatatgactggg

SEQ ID NO: 27923 - DNA, 21 bp, Artificial Sequence
  Description of Artificial Sequence: Synthetic oligonucleotide
gtgtattcgcagggggcgcgg

SEQ ID NO: 27924 - DNA, 21 bp, Artificial Sequence
  Description of Artificial Sequence: Synthetic oligonucleotide
gtgtatactgcggcgagggct

SEQ ID NO: 27925 - DNA, 21 bp, Artificial Sequence
  Description of Artificial Sequence: Synthetic oligonucleotide
gtttatactcagaattcgcct

SEQ ID NO: 27926 - DNA, 21 bp, Artificial Sequence
  Description of Artificial Sequence: Synthetic oligonucleotide
gtttatacttcgtcgatgcat

SEQ ID NO: 27927 - DNA, 21 bp, Artificial Sequence
  Description of Artificial Sequence: Synthetic oligonucleotide
gtgtattatggtaaggagccg

SEQ ID NO: 27928 - DNA, 21 bp, Artificial Sequence
  Description of Artificial Sequence: Synthetic oligonucleotide
tgggctgataagagtcatcct

SEQ ID NO: 27929 - DNA, 21 bp, Artificial Sequence
  Description of Artificial Sequence: Synthetic oligonucleotide
tgggctgataatagtgttaat

SEQ ID NO: 27930 - DNA, 21 bp, Artificial Sequence
  Description of Artificial Sequence: Synthetic oligonucleotide
tgggctgatacgactacgcgt

SEQ ID NO: 27931 - DNA, 21 bp, Artificial Sequence
  Description of Artificial Sequence: Synthetic oligonucleotide
tgggctggtgctatgcctatg

SEQ ID NO: 27932 - DNA, 21 bp, Artificial Sequence
  Description of Artificial Sequence: Synthetic oligonucleotide
tgggcgcataaggggttgcct

SEQ ID NO: 27933 - DNA, 21 bp, Artificial Sequence
  Description of Artificial Sequence: Synthetic oligonucleotide
tgggcgaagtcgcagcttgcg

SEQ ID NO: 27934 - DNA, 21 bp, Artificial Sequence
  Description of Artificial Sequence: Synthetic oligonucleotide
tgggcgccgcggtcgccgggg

SEQ ID NO: 27935 - DNA, 21 bp, Artificial Sequence
  Description of Artificial Sequence: Synthetic oligonucleotide
tgggcttctgctgagaggcag

SEQ ID NO: 27936 - DNA, 21 bp, Artificial Sequence
  Description of Artificial Sequence: Synthetic oligonucleotide
tgggcttcggggcatcaggct

SEQ ID NO: 27937 - DNA, 21 bp, Artificial Sequence
  Description of Artificial Sequence: Synthetic oligonucleotide
tgggcgagtcctattaggggt

SEQ ID NO: 27938 - DNA, 21 bp, Artificial Sequence
  Description of Artificial Sequence: Synthetic oligonucleotide
tgggcgactgagttgaggggg

SEQ ID NO: 27939 - DNA, 21 bp, Artificial Sequence
  Description of Artificial Sequence: Synthetic oligonucleotide
tgggctacgggttcgtcgcct

SEQ ID NO: 27940 - DNA, 21 bp, Artificial Sequence
  Description of Artificial Sequence: Synthetic oligonucleotide
tggtgtcagaggcctggtgct

SEQ ID NO: 27941 - DNA, 21 bp, Artificial Sequence
  Description of Artificial Sequence: Synthetic oligonucleotide
tgggatgctgctgttacgctg

SEQ ID NO: 27942 - DNA, 21 bp, Artificial Sequence
  Description of Artificial Sequence: Synthetic oligonucleotide
tgggatgcgttttcgacggat

SEQ ID NO: 27943 - DNA, 21 bp, Artificial Sequence
  Description of Artificial Sequence: Synthetic oligonucleotide
tgggatgcgcttgagcctgtt

SEQ ID NO: 27944 - DNA, 21 bp, Artificial Sequence
  Description of Artificial Sequence: Synthetic oligonucleotide
tgggatgctatgacggctcct

SEQ ID NO: 27945 - DNA, 21 bp, Artificial Sequence
  Description of Artificial Sequence: Synthetic oligonucleotide
tgggatgcgactgcgcctacg

SEQ ID NO: 27946 - DNA, 21 bp, Artificial Sequence
  Description of Artificial Sequence: Synthetic oligonucleotide
tgggatgatgggggtactcct

SEQ ID NO: 27947 - DNA, 21 bp, Artificial Sequence
  Description of Artificial Sequence: Synthetic oligonucleotide
tgggatattactaagactttt

SEQ ID NO: 27948 - DNA, 21 bp, Artificial Sequence
  Description of Artificial Sequence: Synthetic oligonucleotide
tgggataagaagcctacgatt

SEQ ID NO: 27949 - DNA, 21 bp, Artificial Sequence
  Description of Artificial Sequence: Synthetic oligonucleotide
tgggatcctgcgtatggtagt

SEQ ID NO: 27950 - DNA, 21 bp, Artificial Sequence
  Description of Artificial Sequence: Synthetic oligonucleotide
tgggatccgcggaattcgcag

SEQ ID NO: 27951 - DNA, 21 bp, Artificial Sequence
  Description of Artificial Sequence: Synthetic oligonucleotide
tgggatccgtctcgtactact

SEQ ID NO: 27952 - DNA, 21 bp, Artificial Sequence
  Description of Artificial Sequence: Synthetic oligonucleotide
tgggatcagcttgagcgggct

SEQ ID NO: 27953 - DNA, 21 bp, Artificial Sequence
  Description of Artificial Sequence: Synthetic oligonucleotide
tgggatcagcctcatcaggct

SEQ ID NO: 27954 - DNA, 21 bp, Artificial Sequence
  Description of Artificial Sequence: Synthetic oligonucleotide
tgggatagggatgcggcgctg

SEQ ID NO: 27955 - DNA, 21 bp, Artificial Sequence
  Description of Artificial Sequence: Synthetic oligonucleotide
tgggatagtgggtcgctgggt

SEQ ID NO: 27956 - DNA, 21 bp, Artificial Sequence
  Description of Artificial Sequence: Synthetic oligonucleotide
tgggattctcggcatcatgtg

SEQ ID NO: 27957 - DNA, 21 bp, Artificial Sequence
  Description of Artificial Sequence: Synthetic oligonucleotide
tgggatactcctggtcagtcg

SEQ ID NO: 27958 - DNA, 21 bp, Artificial Sequence
  Description of Artificial Sequence: Synthetic oligonucleotide
tgggatactcagtttagttct

SEQ ID NO: 27959 - DNA, 21 bp, Artificial Sequence
  Description of Artificial Sequence: Synthetic oligonucleotide
tgggaggctcattggacgcct

SEQ ID NO: 27960 - DNA, 21 bp, Artificial Sequence
  Description of Artificial Sequence: Synthetic oligonucleotide
tgggagggtgcgaatccggtg

SEQ ID NO: 27961 - DNA, 21 bp, Artificial Sequence
  Description of Artificial Sequence: Synthetic oligonucleotide
tgggaggggagtcatccttat

SEQ ID NO: 27962 - DNA, 21 bp, Artificial Sequence
  Description of Artificial Sequence: Synthetic oligonucleotide
tgggaggggtctaaggatttt

SEQ ID NO: 27963 - DNA, 21 bp, Artificial Sequence
  Description of Artificial Sequence: Synthetic oligonucleotide
tgggagatgactagggttgat

SEQ ID NO: 27964 - DNA, 21 bp, Artificial Sequence
  Description of Artificial Sequence: Synthetic oligonucleotide
tgggagcgttctaggtctgct

SEQ ID NO: 27965 - DNA, 21 bp, Artificial Sequence
  Description of Artificial Sequence: Synthetic oligonucleotide
tgggagagtggtgggggtttt

SEQ ID NO: 27966 - DNA, 21 bp, Artificial Sequence
  Description of Artificial Sequence: Synthetic oligonucleotide
tggtttgaggatcggttggat

SEQ ID NO: 27967 - DNA, 21 bp, Artificial Sequence
  Description of Artificial Sequence: Synthetic oligonucleotide
tggtttgagaagtgtaaggat

SEQ ID NO: 27968 - DNA, 21 bp, Artificial Sequence
  Description of Artificial Sequence: Synthetic oligonucleotide
tggtttccttcgggtcatgcg

SEQ ID NO: 27969 - DNA, 21 bp, Artificial Sequence
  Description of Artificial Sequence: Synthetic oligonucleotide
tggggggctgctctgactcct

SEQ ID NO: 27970 - DNA, 21 bp, Artificial Sequence
  Description of Artificial Sequence: Synthetic oligonucleotide
tggggggcgaggttggattcg

SEQ ID NO: 27971 - DNA, 21 bp, Artificial Sequence
  Description of Artificial Sequence: Synthetic oligonucleotide
tggggtgctagtcagacgagt

SEQ ID NO: 27972 - DNA, 21 bp, Artificial Sequence
  Description of Artificial Sequence: Synthetic oligonucleotide
tgggggggtacgagtccgggt

SEQ ID NO: 27973 - DNA, 21 bp, Artificial Sequence
  Description of Artificial Sequence: Synthetic oligonucleotide
tgggggcataataattcgccg

SEQ ID NO: 27974 - DNA, 21 bp, Artificial Sequence
  Description of Artificial Sequence: Synthetic oligonucleotide
tggggtcattcgtctggggtg

SEQ ID NO: 27975 - DNA, 21 bp, Artificial Sequence
  Description of Artificial Sequence: Synthetic oligonucleotide
tggggtctgttgcattctgct

SEQ ID NO: 27976 - DNA, 21 bp, Artificial Sequence
  Description of Artificial Sequence: Synthetic oligonucleotide
tgggggctggttactagtcct

SEQ ID NO: 27977 - DNA, 21 bp, Artificial Sequence
  Description of Artificial Sequence: Synthetic oligonucleotide
tgggggaatcagcagcctagg

SEQ ID NO: 27978 - DNA, 21 bp, Artificial Sequence
  Description of Artificial Sequence: Synthetic oligonucleotide
tgggggaattctcataatact

SEQ ID NO: 27979 - DNA, 21 bp, Artificial Sequence
  Description of Artificial Sequence: Synthetic oligonucleotide
tggggtcctactacgtctcat

SEQ ID NO: 27980 - DNA, 21 bp, Artificial Sequence
  Description of Artificial Sequence: Synthetic oligonucleotide
tgggggtctggggcggcgggt

SEQ ID NO: 27981 - DNA, 21 bp, Artificial Sequence
  Description of Artificial Sequence: Synthetic oligonucleotide
tgggggtctggggctgagact

SEQ ID NO: 27982 - DNA, 21 bp, Artificial Sequence
  Description of Artificial Sequence: Synthetic oligonucleotide
tgggggtcttcggggcagggt

SEQ ID NO: 27983 - DNA, 21 bp, Artificial Sequence
  Description of Artificial Sequence: Synthetic oligonucleotide
tggggtactcagctggcgatg

SEQ ID NO: 27984 - DNA, 21 bp, Artificial Sequence
  Description of Artificial Sequence: Synthetic oligonucleotide
tggggtacgtcggataagtct

SEQ ID NO: 27985 - DNA, 21 bp, Artificial Sequence
  Description of Artificial Sequence: Synthetic oligonucleotide
tgggggtatttgcatgttgcg

SEQ ID NO: 27986 - DNA, 21 bp, Artificial Sequence
  Description of Artificial Sequence: Synthetic oligonucleotide
tggcatgggactggtctgatt

SEQ ID NO: 27987 - DNA, 21 bp, Artificial Sequence
  Description of Artificial Sequence: Synthetic oligonucleotide
tggcataagtcgagtagtagt

SEQ ID NO: 27988 - DNA, 21 bp, Artificial Sequence
  Description of Artificial Sequence: Synthetic oligonucleotide
tggcatccttctggttcgcgt

SEQ ID NO: 27989 - DNA, 21 bp, Artificial Sequence
  Description of Artificial Sequence: Synthetic oligonucleotide
tggcataggactgcgcaggat

SEQ ID NO: 27990 - DNA, 21 bp, Artificial Sequence
  Description of Artificial Sequence: Synthetic oligonucleotide
tggcatagtgctaagcttgcg

SEQ ID NO: 27991 - DNA, 21 bp, Artificial Sequence
  Description of Artificial Sequence: Synthetic oligonucleotide
tggcatagtttgatggagccg

SEQ ID NO: 27992 - DNA, 21 bp, Artificial Sequence
  Description of Artificial Sequence: Synthetic oligonucleotide
tggcattctcggatgtatgag

SEQ ID NO: 27993 - DNA, 21 bp, Artificial Sequence
  Description of Artificial Sequence: Synthetic oligonucleotide
tggcatagttctgctactcag

SEQ ID NO: 27994 - DNA, 21 bp, Artificial Sequence
  Description of Artificial Sequence: Synthetic oligonucleotide
tggcattcgtcggatcttgtg

SEQ ID NO: 27995 - DNA, 21 bp, Artificial Sequence
  Description of Artificial Sequence: Synthetic oligonucleotide
tggattggtaatggggggccg

SEQ ID NO: 27996 - DNA, 21 bp, Artificial Sequence
  Description of Artificial Sequence: Synthetic oligonucleotide
tggattgggcagaatactgtg

SEQ ID NO: 27997 - DNA, 21 bp, Artificial Sequence
  Description of Artificial Sequence: Synthetic oligonucleotide
tggattaaggaggcttcgtct

SEQ ID NO: 27998 - DNA, 21 bp, Artificial Sequence
  Description of Artificial Sequence: Synthetic oligonucleotide
tggattcctggggctccgagt

SEQ ID NO: 27999 - DNA, 21 bp, Artificial Sequence
  Description of Artificial Sequence: Synthetic oligonucleotide
tggattccgcagcaggatgtt

SEQ ID NO: 28000 - DNA, 21 bp, Artificial Sequence
  Description of Artificial Sequence: Synthetic oligonucleotide
tggattccgtcgggtttgagt

SEQ ID NO: 28001 - DNA, 21 bp, Artificial Sequence
  Description of Artificial Sequence: Synthetic oligonucleotide
tggattactacggagccgttg

SEQ ID NO: 28002 - DNA, 21 bp, Artificial Sequence
  Description of Artificial Sequence: Synthetic oligonucleotide
tggaaggctaatttgccttct

SEQ ID NO: 28003 - DNA, 21 bp, Artificial Sequence
  Description of Artificial Sequence: Synthetic oligonucleotide
tggaaggatgagtgtcagacg

SEQ ID NO: 28004 - DNA, 21 bp, Artificial Sequence
  Description of Artificial Sequence: Synthetic oligonucleotide
tggaaggattcgcattatgag

SEQ ID NO: 28005 - DNA, 21 bp, Artificial Sequence
  Description of Artificial Sequence: Synthetic oligonucleotide
tggaaggagcatggtgctgcg

SEQ ID NO: 28006 - DNA, 21 bp, Artificial Sequence
  Description of Artificial Sequence: Synthetic oligonucleotide
tggaagcatagtactcagtct

SEQ ID NO: 28007 - DNA, 21 bp, Artificial Sequence
  Description of Artificial Sequence: Synthetic oligonucleotide
tggaagattatgattgcggag

SEQ ID NO: 28008 - DNA, 21 bp, Artificial Sequence
  Description of Artificial Sequence: Synthetic oligonucleotide
tggaagaagaatatggatttt

SEQ ID NO: 28009 - DNA, 21 bp, Artificial Sequence
  Description of Artificial Sequence: Synthetic oligonucleotide
tggaagttgaatagggatcag

SEQ ID NO: 28010 - DNA, 21 bp, Artificial Sequence
  Description of Artificial Sequence: Synthetic oligonucleotide
tggaagaatacttcttgtggt

SEQ ID NO: 28011 - DNA, 21 bp, Artificial Sequence
  Description of Artificial Sequence: Synthetic oligonucleotide
tggaagccggctgtgcctcag

SEQ ID NO: 28012 - DNA, 21 bp, Artificial Sequence
  Description of Artificial Sequence: Synthetic oligonucleotide
tggaagccggagattcttccg

SEQ ID NO: 28013 - DNA, 21 bp, Artificial Sequence
  Description of Artificial Sequence: Synthetic oligonucleotide
tggaagcctcctcttaatcct

SEQ ID NO: 28014 - DNA, 21 bp, Artificial Sequence
  Description of Artificial Sequence: Synthetic oligonucleotide
tggaagcaggggtcgactggt

SEQ ID NO: 28015 - DNA, 21 bp, Artificial Sequence
  Description of Artificial Sequence: Synthetic oligonucleotide
tggaagagtgattctgcgtcg

SEQ ID NO: 28016 - DNA, 21 bp, Artificial Sequence
  Description of Artificial Sequence: Synthetic oligonucleotide
tggaagtctaatacgttgacg

SEQ ID NO: 28017 - DNA, 21 bp, Artificial Sequence
  Description of Artificial Sequence: Synthetic oligonucleotide
tggaagtctcagattccgttg

SEQ ID NO: 28018 - DNA, 21 bp, Artificial Sequence
  Description of Artificial Sequence: Synthetic oligonucleotide
tggaagagtcagttgccgaat

SEQ ID NO: 28019 - DNA, 21 bp, Artificial Sequence
  Description of Artificial Sequence: Synthetic oligonucleotide
tggaagtctcagatgaatcct

SEQ ID NO: 28020 - DNA, 21 bp, Artificial Sequence
  Description of Artificial Sequence: Synthetic oligonucleotide
tggaagtcgactgatctgact

SEQ ID NO: 28021 - DNA, 21 bp, Artificial Sequence
  Description of Artificial Sequence: Synthetic oligonucleotide
tggaaggtttcgactgatacg

SEQ ID NO: 28022 - DNA, 21 bp, Artificial Sequence
  Description of Artificial Sequence: Synthetic oligonucleotide
tggctggctgatccgtctgat

SEQ ID NO: 28023 - DNA, 21 bp, Artificial Sequence
  Description of Artificial Sequence: Synthetic oligonucleotide
tggcttgagaattctcagagt

SEQ ID NO: 28024 - DNA, 21 bp, Artificial Sequence
  Description of Artificial Sequence: Synthetic oligonucleotide
tggcttgagtcggggactggt

SEQ ID NO: 28025 - DNA, 21 bp, Artificial Sequence
  Description of Artificial Sequence: Synthetic oligonucleotide
tggctgggtagggcggatgct

SEQ ID NO: 28026 - DNA, 21 bp, Artificial Sequence
  Description of Artificial Sequence: Synthetic oligonucleotide
tggcttcatgatactacttct

SEQ ID NO: 28027 - DNA, 21 bp, Artificial Sequence
  Description of Artificial Sequence: Synthetic oligonucleotide
tggctgcatgagcagcctaat

SEQ ID NO: 28028 - DNA, 21 bp, Artificial Sequence
  Description of Artificial Sequence: Synthetic oligonucleotide
tggcttcataggtcgaatgcg

SEQ ID NO: 28029 - DNA, 21 bp, Artificial Sequence
  Description of Artificial Sequence: Synthetic oligonucleotide
tggttgaagcagactgataat

SEQ ID NO: 28030 - DNA, 21 bp, Artificial Sequence
  Description of Artificial Sequence: Synthetic oligonucleotide
tggctgcttaatcaggaggag

SEQ ID NO: 28031 - DNA, 21 bp, Artificial Sequence
  Description of Artificial Sequence: Synthetic oligonucleotide
tggctgaatgatagtagtcgt

SEQ ID NO: 28032 - DNA, 21 bp, Artificial Sequence
  Description of Artificial Sequence: Synthetic oligonucleotide
tggcttccgaagttgccgcat

SEQ ID NO: 28033 - DNA, 21 bp, Artificial Sequence
  Description of Artificial Sequence: Synthetic oligonucleotide
tggcttcctacgcagactgag

SEQ ID NO: 28034 - DNA, 21 bp, Artificial Sequence
  Description of Artificial Sequence: Synthetic oligonucleotide
tggcttaggactcctgatgct

SEQ ID NO: 28035 - DNA, 21 bp, Artificial Sequence
  Description of Artificial Sequence: Synthetic oligonucleotide
tggctgacgtctttgaagatg

SEQ ID NO: 28036 - DNA, 21 bp, Artificial Sequence
  Description of Artificial Sequence: Synthetic oligonucleotide
tggctgacttcgcctaatgtg

SEQ ID NO: 28037 - DNA, 21 bp, Artificial Sequence
  Description of Artificial Sequence: Synthetic oligonucleotide
tggatggctatgaggcaggat

SEQ ID NO: 28038 - DNA, 21 bp, Artificial Sequence
  Description of Artificial Sequence: Synthetic oligonucleotide
tggatgcttcaggagacgtcg

SEQ ID NO: 28039 - DNA, 21 bp, Artificial Sequence
  Description of Artificial Sequence: Synthetic oligonucleotide
tggatgatggagtcgcgtcct

SEQ ID NO: 28040 - DNA, 21 bp, Artificial Sequence
  Description of Artificial Sequence: Synthetic oligonucleotide
tggatgcagtcggctaatcgg

SEQ ID NO: 28041 - DNA, 21 bp, Artificial Sequence
  Description of Artificial Sequence: Synthetic oligonucleotide
tggatgtcgcggttgccggcg

SEQ ID NO: 28042 - DNA, 21 bp, Artificial Sequence
  Description of Artificial Sequence: Synthetic oligonucleotide
tggaatgatgttacggctcgg

SEQ ID NO: 28043 - DNA, 21 bp, Artificial Sequence
  Description of Artificial Sequence: Synthetic oligonucleotide
tggaataagtctttgctgagt

SEQ ID NO: 28044 - DNA, 21 bp, Artificial Sequence
  Description of Artificial Sequence: Synthetic oligonucleotide
tggaataagacggagctggat

SEQ ID NO: 28045 - DNA, 21 bp, Artificial Sequence
  Description of Artificial Sequence: Synthetic oligonucleotide
tggaatttggagtctactacg

SEQ ID NO: 28046 - DNA, 21 bp, Artificial Sequence
  Description of Artificial Sequence: Synthetic oligonucleotide
tggaataatccggatcagctt

SEQ ID NO: 28047 - DNA, 21 bp, Artificial Sequence
  Description of Artificial Sequence: Synthetic oligonucleotide
tggaatcctcctctgccggct

SEQ ID NO: 28048 - DNA, 21 bp, Artificial Sequence
  Description of Artificial Sequence: Synthetic oligonucleotide
tggaatcctcgttcgagtgag

SEQ ID NO: 28049 - DNA, 21 bp, Artificial Sequence
  Description of Artificial Sequence: Synthetic oligonucleotide
tggaatactcagcagggtgtt

SEQ ID NO: 28050 - DNA, 21 bp, Artificial Sequence
  Description of Artificial Sequence: Synthetic oligonucleotide
tggaatacgacgctgcctatt

SEQ ID NO: 28051 - DNA, 21 bp, Artificial Sequence
  Description of Artificial Sequence: Synthetic oligonucleotide
tggaatacggtgacgattcgg

SEQ ID NO: 28052 - DNA, 21 bp, Artificial Sequence
  Description of Artificial Sequence: Synthetic oligonucleotide
tggccggctaagactgttgag

SEQ ID NO: 28053 - DNA, 21 bp, Artificial Sequence
  Description of Artificial Sequence: Synthetic oligonucleotide
tggcctgcgcaggtttcgagt

SEQ ID NO: 28054 - DNA, 21 bp, Artificial Sequence
  Description of Artificial Sequence: Synthetic oligonucleotide
tggccggcttcggttactgat

SEQ ID NO: 28055 - DNA, 21 bp, Artificial Sequence
  Description of Artificial Sequence: Synthetic oligonucleotide
tggcctgagaagaggctgacg

SEQ ID NO: 28056 - DNA, 21 bp, Artificial Sequence
  Description of Artificial Sequence: Synthetic oligonucleotide
tggcctgagtcttatagtact

SEQ ID NO: 28057 - DNA, 21 bp, Artificial Sequence
  Description of Artificial Sequence: Synthetic oligonucleotide
tggcctggtatgagtgcgggt

SEQ ID NO: 28058 - DNA, 21 bp, Artificial Sequence
  Description of Artificial Sequence: Synthetic oligonucleotide
tggcctggttcgagtcatgtg

SEQ ID NO: 28059 - DNA, 21 bp, Artificial Sequence
  Description of Artificial Sequence: Synthetic oligonucleotide
tggccgaatcttgtgagtggt

SEQ ID NO: 28060 - DNA, 21 bp, Artificial Sequence
  Description of Artificial Sequence: Synthetic oligonucleotide
tggccgcctgctagtacgctg

SEQ ID NO: 28061 - DNA, 21 bp, Artificial Sequence
  Description of Artificial Sequence: Synthetic oligonucleotide
tggcctcctgctgtttctagt

SEQ ID NO: 28062 - DNA, 21 bp, Artificial Sequence
  Description of Artificial Sequence: Synthetic oligonucleotide
tggcctcctagtgtgaatggt

SEQ ID NO: 28063 - DNA, 21 bp, Artificial Sequence
  Description of Artificial Sequence: Synthetic oligonucleotide
tggcctcagtctagtagtggg

SEQ ID NO: 28064 - DNA, 21 bp, Artificial Sequence
  Description of Artificial Sequence: Synthetic oligonucleotide
tggcctagtatggatgggagt

SEQ ID NO: 28065 - DNA, 21 bp, Artificial Sequence
  Description of Artificial Sequence: Synthetic oligonucleotide
tggccgtcgtcgattcagatt

SEQ ID NO: 28066 - DNA, 21 bp, Artificial Sequence
  Description of Artificial Sequence: Synthetic oligonucleotide
tggccgtcgtctactttgtct

SEQ ID NO: 28067 - DNA, 21 bp, Artificial Sequence
  Description of Artificial Sequence: Synthetic oligonucleotide
tggccgacgattattaatcgt

SEQ ID NO: 28068 - DNA, 21 bp, Artificial Sequence
  Description of Artificial Sequence: Synthetic oligonucleotide
tggcctactaagtctactcct

SEQ ID NO: 28069 - DNA, 21 bp, Artificial Sequence
  Description of Artificial Sequence: Synthetic oligonucleotide
tggcctacgaattcgaggccg

SEQ ID NO: 28070 - DNA, 21 bp, Artificial Sequence
  Description of Artificial Sequence: Synthetic oligonucleotide
tggcctactaatacgattcct

SEQ ID NO: 28071 - DNA, 21 bp, Artificial Sequence
  Description of Artificial Sequence: Synthetic oligonucleotide
tggcctgttcatcatgctgct

SEQ ID NO: 28072 - DNA, 21 bp, Artificial Sequence
  Description of Artificial Sequence: Synthetic oligonucleotide
tggcctgttacttcgtatggt

SEQ ID NO: 28073 - DNA, 21 bp, Artificial Sequence
  Description of Artificial Sequence: Synthetic oligonucleotide
tggccttatgatcctgggcgg

SEQ ID NO: 28074 - DNA, 21 bp, Artificial Sequence
  Description of Artificial Sequence: Synthetic oligonucleotide
tggcagggtcttacgcagggt

SEQ ID NO: 28075 - DNA, 21 bp, Artificial Sequence
  Description of Artificial Sequence: Synthetic oligonucleotide
tggcagctggctactcagcct

SEQ ID NO: 28076 - DNA, 21 bp, Artificial Sequence
  Description of Artificial Sequence: Synthetic oligonucleotide
tggcagatgttgcttagtgag

SEQ ID NO: 28077 - DNA, 21 bp, Artificial Sequence
  Description of Artificial Sequence: Synthetic oligonucleotide
tggcagcagctgtcggctagt

SEQ ID NO: 28078 - DNA, 21 bp, Artificial Sequence
  Description of Artificial Sequence: Synthetic oligonucleotide
tggcagcggtcgggtgatgtg

SEQ ID NO: 28079 - DNA, 21 bp, Artificial Sequence
  Description of Artificial Sequence: Synthetic oligonucleotide
tggcagagtcaggctactatg

SEQ ID NO: 28080 - DNA, 21 bp, Artificial Sequence
  Description of Artificial Sequence: Synthetic oligonucleotide
tggcagactcagagtaggtct

SEQ ID NO: 28081 - DNA, 21 bp, Artificial Sequence
  Description of Artificial Sequence: Synthetic oligonucleotide
tggcagtattcgcatgagcct

SEQ ID NO: 28082 - DNA, 21 bp, Artificial Sequence
  Description of Artificial Sequence: Synthetic oligonucleotide
tggcgggctatgttggaggag

SEQ ID NO: 28083 - DNA, 21 bp, Artificial Sequence
  Description of Artificial Sequence: Synthetic oligonucleotide
tggcgtgcgcctgggtctgct

SEQ ID NO: 28084 - DNA, 21 bp, Artificial Sequence
  Description of Artificial Sequence: Synthetic oligonucleotide
tggcgggatgctacttgttgt

SEQ ID NO: 28085 - DNA, 21 bp, Artificial Sequence
  Description of Artificial Sequence: Synthetic oligonucleotide
tggcgtgagcgttatgcggcg

SEQ ID NO: 28086 - DNA, 21 bp, Artificial Sequence
  Description of Artificial Sequence: Synthetic oligonucleotide
tggcgtggtctggatattgag

SEQ ID NO: 28087 - DNA, 21 bp, Artificial Sequence
  Description of Artificial Sequence: Synthetic oligonucleotide
tggcggcatgattataatttg

SEQ ID NO: 28088 - DNA, 21 bp, Artificial Sequence
  Description of Artificial Sequence: Synthetic oligonucleotide
tggcggcatactgaggcgatt

SEQ ID NO: 28089 - DNA, 21 bp, Artificial Sequence
  Description of Artificial Sequence: Synthetic oligonucleotide
tggcggattactgcggagtct

SEQ ID NO: 28090 - DNA, 21 bp, Artificial Sequence
  Description of Artificial Sequence: Synthetic oligonucleotide
tggcggcctttggtggagact

SEQ ID NO: 28091 - DNA, 21 bp, Artificial Sequence
  Description of Artificial Sequence: Synthetic oligonucleotide
tggcgtccgaatatggcggct

SEQ ID NO: 28092 - DNA, 21 bp, Artificial Sequence
  Description of Artificial Sequence: Synthetic oligonucleotide
tggcgtcctaatatgtctgtt

SEQ ID NO: 28093 - DNA, 21 bp, Artificial Sequence
  Description of Artificial Sequence: Synthetic oligonucleotide
tggcggccgcagcggcctgtg

SEQ ID NO: 28094 - DNA, 21 bp, Artificial Sequence
  Description of Artificial Sequence: Synthetic oligonucleotide
tggcggcaggagacgtctgtg

SEQ ID NO: 28095 - DNA, 21 bp, Artificial Sequence
  Description of Artificial Sequence: Synthetic oligonucleotide
tggaggcgtgatgcttcgcct

SEQ ID NO: 28096 - DNA, 21 bp, Artificial Sequence
  Description of Artificial Sequence: Synthetic oligonucleotide
tggcggtcggcgtcttcggcg

SEQ ID NO: 28097 - DNA, 21 bp, Artificial Sequence
  Description of Artificial Sequence: Synthetic oligonucleotide
tggcgttctcgggagattgct

SEQ ID NO: 28098 - DNA, 21 bp, Artificial Sequence
  Description of Artificial Sequence: Synthetic oligonucleotide
tggcggtcgtcggctgaggct

SEQ ID NO: 28099 - DNA, 21 bp, Artificial Sequence
  Description of Artificial Sequence: Synthetic oligonucleotide
tggtcggcggatccggatacg

SEQ ID NO: 28100 - DNA, 21 bp, Artificial Sequence
  Description of Artificial Sequence: Synthetic oligonucleotide
tggtcggcgtcttctcatcag

SEQ ID NO: 28101 - DNA, 21 bp, Artificial Sequence
  Description of Artificial Sequence: Synthetic oligonucleotide
tggtcggctgttggggaggtg

SEQ ID NO: 28102 - DNA, 21 bp, Artificial Sequence
  Description of Artificial Sequence: Synthetic oligonucleotide
tggagtgattctactgctgtt

SEQ ID NO: 28103 - DNA, 21 bp, Artificial Sequence
  Description of Artificial Sequence: Synthetic oligonucleotide
tggtctggtcatcctgtggct

SEQ ID NO: 28104 - DNA, 21 bp, Artificial Sequence
  Description of Artificial Sequence: Synthetic oligonucleotide
tggtcgggtaaggctaatgcg

SEQ ID NO: 28105 - DNA, 21 bp, Artificial Sequence
  Description of Artificial Sequence: Synthetic oligonucleotide
tggtctggtccgattagtctt

SEQ ID NO: 28106 - DNA, 21 bp, Artificial Sequence
  Description of Artificial Sequence: Synthetic oligonucleotide
tggtctcatgggcctatgccg

SEQ ID NO: 28107 - DNA, 21 bp, Artificial Sequence
  Description of Artificial Sequence: Synthetic oligonucleotide
tggtctcatgggtcgactacg

SEQ ID NO: 28108 - DNA, 21 bp, Artificial Sequence
  Description of Artificial Sequence: Synthetic oligonucleotide
tggtcgaaggttcctgatagg

SEQ ID NO: 28109 - DNA, 21 bp, Artificial Sequence
  Description of Artificial Sequence: Synthetic oligonucleotide
tggtctcttgttcatcgtgag

SEQ ID NO: 28110 - DNA, 21 bp, Artificial Sequence
  Description of Artificial Sequence: Synthetic oligonucleotide
tggagtaatcatgcgcatgct

SEQ ID NO: 28111 - DNA, 21 bp, Artificial Sequence
  Description of Artificial Sequence: Synthetic oligonucleotide
tggagtcctgcgagggagacg

SEQ ID NO: 28112 - DNA, 21 bp, Artificial Sequence
  Description of Artificial Sequence: Synthetic oligonucleotide
tggtctcctttgtatcatgcg

SEQ ID NO: 28113 - DNA, 21 bp, Artificial Sequence
  Description of Artificial Sequence: Synthetic oligonucleotide
tggagtccgaattcgactccg

SEQ ID NO: 28114 - DNA, 21 bp, Artificial Sequence
  Description of Artificial Sequence: Synthetic oligonucleotide
tggtcgcctaatgtgtgtcct

SEQ ID NO: 28115 - DNA, 21 bp, Artificial Sequence
  Description of Artificial Sequence: Synthetic oligonucleotide
tggtcgcctcggaatactctt

SEQ ID NO: 28116 - DNA, 21 bp, Artificial Sequence
  Description of Artificial Sequence: Synthetic oligonucleotide
tggtctccgagtgagggtaag

SEQ ID NO: 28117 - DNA, 21 bp, Artificial Sequence
  Description of Artificial Sequence: Synthetic oligonucleotide
tggtctccgagtcaggcttat

SEQ ID NO: 28118 - DNA, 21 bp, Artificial Sequence
  Description of Artificial Sequence: Synthetic oligonucleotide
tggtcgcctgttgttgtgcgg

SEQ ID NO: 28119 - DNA, 21 bp, Artificial Sequence
  Description of Artificial Sequence: Synthetic oligonucleotide
tggtctcgtgcggcggttgat

SEQ ID NO: 28120 - DNA, 21 bp, Artificial Sequence
  Description of Artificial Sequence: Synthetic oligonucleotide
tggagtaggccggctgctgat

SEQ ID NO: 28121 - DNA, 21 bp, Artificial Sequence
  Description of Artificial Sequence: Synthetic oligonucleotide
tggagtcggcaggatttgccg

SEQ ID NO: 28122 - DNA, 21 bp, Artificial Sequence
  Description of Artificial Sequence: Synthetic oligonucleotide
tggtcttctgcttatgtttct

SEQ ID NO: 28123 - DNA, 21 bp, Artificial Sequence
  Description of Artificial Sequence: Synthetic oligonucleotide
tggtcttctgatgctcctgag

SEQ ID NO: 28124 - DNA, 21 bp, Artificial Sequence
  Description of Artificial Sequence: Synthetic oligonucleotide
tggtcttctatgagtatgcat

SEQ ID NO: 28125 - DNA, 21 bp, Artificial Sequence
  Description of Artificial Sequence: Synthetic oligonucleotide
tggagtacgaagctggagggg

SEQ ID NO: 28126 - DNA, 21 bp, Artificial Sequence
  Description of Artificial Sequence: Synthetic oligonucleotide
tggtctactaatgcttatcag

SEQ ID NO: 28127 - DNA, 21 bp, Artificial Sequence
  Description of Artificial Sequence: Synthetic oligonucleotide
tggtctacttctactttgcat

SEQ ID NO: 28128 - DNA, 21 bp, Artificial Sequence
  Description of Artificial Sequence: Synthetic oligonucleotide
tggactgctccttctgatgtg

SEQ ID NO: 28129 - DNA, 21 bp, Artificial Sequence
  Description of Artificial Sequence: Synthetic oligonucleotide
tggactgctcagaatgttcag

SEQ ID NO: 28130 - DNA, 21 bp, Artificial Sequence
  Description of Artificial Sequence: Synthetic oligonucleotide
tggactgctagtagggcgtct

SEQ ID NO: 28131 - DNA, 21 bp, Artificial Sequence
  Description of Artificial Sequence: Synthetic oligonucleotide
tggactgagcgtgtgggtact

SEQ ID NO: 28132 - DNA, 21 bp, Artificial Sequence
  Description of Artificial Sequence: Synthetic oligonucleotide
tggactggttctgctcatcag

SEQ ID NO: 28133 - DNA, 21 bp, Artificial Sequence
  Description of Artificial Sequence: Synthetic oligonucleotide
tggacggggtatagtcagcag

SEQ ID NO: 28134 - DNA, 21 bp, Artificial Sequence
  Description of Artificial Sequence: Synthetic oligonucleotide
tggacgaattcgactcagcct

SEQ ID NO: 28135 - DNA, 21 bp, Artificial Sequence
  Description of Artificial Sequence: Synthetic oligonucleotide
tggacgcctcatagtcctatg

SEQ ID NO: 28136 - DNA, 21 bp, Artificial Sequence
  Description of Artificial Sequence: Synthetic oligonucleotide
tggactccgcgtgttatgcat

SEQ ID NO: 28137 - DNA, 21 bp, Artificial Sequence
  Description of Artificial Sequence: Synthetic oligonucleotide
tggacgcctagtatggctccg

SEQ ID NO: 28138 - DNA, 21 bp, Artificial Sequence
  Description of Artificial Sequence: Synthetic oligonucleotide
tggactccttctaataagcat

SEQ ID NO: 28139 - DNA, 21 bp, Artificial Sequence
  Description of Artificial Sequence: Synthetic oligonucleotide
tggactcgtttggagtctctg

SEQ ID NO: 28140 - DNA, 21 bp, Artificial Sequence
  Description of Artificial Sequence: Synthetic oligonucleotide
tggacgagtgatggtaattat

SEQ ID NO: 28141 - DNA, 21 bp, Artificial Sequence
  Description of Artificial Sequence: Synthetic oligonucleotide
tggacgtcgaagattgggccg

SEQ ID NO: 28142 - DNA, 21 bp, Artificial Sequence
  Description of Artificial Sequence: Synthetic oligonucleotide
tggacttcgagggatgcttct

SEQ ID NO: 28143 - DNA, 21 bp, Artificial Sequence
  Description of Artificial Sequence: Synthetic oligonucleotide
tggacttctagtggggggagt

SEQ ID NO: 28144 - DNA, 21 bp, Artificial Sequence
  Description of Artificial Sequence: Synthetic oligonucleotide
tggacgactaatacgggtggg

SEQ ID NO: 28145 - DNA, 21 bp, Artificial Sequence
  Description of Artificial Sequence: Synthetic oligonucleotide
tggactacgtcgggttcgatt

SEQ ID NO: 28146 - DNA, 21 bp, Artificial Sequence
  Description of Artificial Sequence: Synthetic oligonucleotide
tggactgttgatcttactcat

SEQ ID NO: 28147 - DNA, 21 bp, Artificial Sequence
  Description of Artificial Sequence: Synthetic oligonucleotide
tggactgtggagacttctcat

SEQ ID NO: 28148 - DNA, 21 bp, Artificial Sequence
  Description of Artificial Sequence: Synthetic oligonucleotide
tgggtgcattcttcggatagt

SEQ ID NO: 28149 - DNA, 21 bp, Artificial Sequence
  Description of Artificial Sequence: Synthetic oligonucleotide
tgggtgattcagaattgtaat

SEQ ID NO: 28150 - DNA, 21 bp, Artificial Sequence
  Description of Artificial Sequence: Synthetic oligonucleotide
tgggttcagtctggtactcct

SEQ ID NO: 28151 - DNA, 21 bp, Artificial Sequence
  Description of Artificial Sequence: Synthetic oligonucleotide
tgggtgacggggctgacggat

SEQ ID NO: 28152 - DNA, 21 bp, Artificial Sequence
  Description of Artificial Sequence: Synthetic oligonucleotide
tgggtgactcagcatccttct

SEQ ID NO: 28153 - DNA, 21 bp, Artificial Sequence
  Description of Artificial Sequence: Synthetic oligonucleotide
tatgctgctgcgccttctagg

SEQ ID NO: 28154 - DNA, 21 bp, Artificial Sequence
  Description of Artificial Sequence: Synthetic oligonucleotide
tatgctgctgcgtatgcttct

SEQ ID NO: 28155 - DNA, 21 bp, Artificial Sequence
  Description of Artificial Sequence: Synthetic oligonucleotide
tatgctgctcattataaggag

SEQ ID NO: 28156 - DNA, 21 bp, Artificial Sequence
  Description of Artificial Sequence: Synthetic oligonucleotide
tatgctgctaataggcagccg

SEQ ID NO: 28157 - DNA, 21 bp, Artificial Sequence
  Description of Artificial Sequence: Synthetic oligonucleotide
tatgctgcgccttcgtctgcg

SEQ ID NO: 28158 - DNA, 21 bp, Artificial Sequence
  Description of Artificial Sequence: Synthetic oligonucleotide
tatgctgcgtctcatgtttct

SEQ ID NO: 28159 - DNA, 21 bp, Artificial Sequence
  Description of Artificial Sequence: Synthetic oligonucleotide
tatgcggcttcgaatctgacg

SEQ ID NO: 28160 - DNA, 21 bp, Artificial Sequence
  Description of Artificial Sequence: Synthetic oligonucleotide
tatgcggcttcgtcggctacg

SEQ ID NO: 28161 - DNA, 21 bp, Artificial Sequence
  Description of Artificial Sequence: Synthetic oligonucleotide
tatgctgcggtgggtcttaat

SEQ ID NO: 28162 - DNA, 21 bp, Artificial Sequence
  Description of Artificial Sequence: Synthetic oligonucleotide
tatgcggctgttcggtcgaat

SEQ ID NO: 28163 - DNA, 21 bp, Artificial Sequence
  Description of Artificial Sequence: Synthetic oligonucleotide
tatgcggatcttccgagtcgt

SEQ ID NO: 28164 - DNA, 21 bp, Artificial Sequence
  Description of Artificial Sequence: Synthetic oligonucleotide
tatgcggatagtgctccgtat

SEQ ID NO: 28165 - DNA, 21 bp, Artificial Sequence
  Description of Artificial Sequence: Synthetic oligonucleotide
tatgcggagcggcaggggcgt

SEQ ID NO: 28166 - DNA, 21 bp, Artificial Sequence
  Description of Artificial Sequence: Synthetic oligonucleotide
tatgctgagtattcgaggaat

SEQ ID NO: 28167 - DNA, 21 bp, Artificial Sequence
  Description of Artificial Sequence: Synthetic oligonucleotide
tatgcgggtgctgcgttgggt

SEQ ID NO: 28168 - DNA, 21 bp, Artificial Sequence
  Description of Artificial Sequence: Synthetic oligonucleotide
tatgcgggggcgcagcgtagt

SEQ ID NO: 28169 - DNA, 21 bp, Artificial Sequence
  Description of Artificial Sequence: Synthetic oligonucleotide
tatgctggtggtaagctgatt

SEQ ID NO: 28170 - DNA, 21 bp, Artificial Sequence
  Description of Artificial Sequence: Synthetic oligonucleotide
tatgctggtaaggagcctgag

SEQ ID NO: 28171 - DNA, 21 bp, Artificial Sequence
  Description of Artificial Sequence: Synthetic oligonucleotide
tatgctgggccgaattctcct

SEQ ID NO: 28172 - DNA, 21 bp, Artificial Sequence
  Description of Artificial Sequence: Synthetic oligonucleotide
tatgctgggagtgaggttatg

SEQ ID NO: 28173 - DNA, 21 bp, Artificial Sequence
  Description of Artificial Sequence: Synthetic oligonucleotide
tatgctggtagtgtgacttct

SEQ ID NO: 28174 - DNA, 21 bp, Artificial Sequence
  Description of Artificial Sequence: Synthetic oligonucleotide
tatgctcatcagaagcctatg

SEQ ID NO: 28175 - DNA, 21 bp, Artificial Sequence
  Description of Artificial Sequence: Synthetic oligonucleotide
tatgctcatacgcgtgttgtg

SEQ ID NO: 28176 - DNA, 21 bp, Artificial Sequence
  Description of Artificial Sequence: Synthetic oligonucleotide
tatgctaagcctcttacttcg

SEQ ID NO: 28177 - DNA, 21 bp, Artificial Sequence
  Description of Artificial Sequence: Synthetic oligonucleotide
tatgcgcttgattcggcggag

SEQ ID NO: 28178 - DNA, 21 bp, Artificial Sequence
  Description of Artificial Sequence: Synthetic oligonucleotide
tatgcgcttgagcatcgtaat

SEQ ID NO: 28179 - DNA, 21 bp, Artificial Sequence
  Description of Artificial Sequence: Synthetic oligonucleotide
tatgcgttgcatcaggataag

SEQ ID NO: 28180 - DNA, 21 bp, Artificial Sequence
  Description of Artificial Sequence: Synthetic oligonucleotide
tatgcgcttcagtctaaggag

SEQ ID NO: 28181 - DNA, 21 bp, Artificial Sequence
  Description of Artificial Sequence: Synthetic oligonucleotide
tatgctctgtctggtagtact

SEQ ID NO: 28182 - DNA, 21 bp, Artificial Sequence
  Description of Artificial Sequence: Synthetic oligonucleotide
tatgctaatgctatgactctt

SEQ ID NO: 28183 - DNA, 21 bp, Artificial Sequence
  Description of Artificial Sequence: Synthetic oligonucleotide
tatgctaatgattctgggttg

SEQ ID NO: 28184 - DNA, 21 bp, Artificial Sequence
  Description of Artificial Sequence: Synthetic oligonucleotide
tatgcgaataatttgccgcat

SEQ ID NO: 28185 - DNA, 21 bp, Artificial Sequence
  Description of Artificial Sequence: Synthetic oligonucleotide
tatgcgaatactacgtcggcg

SEQ ID NO: 28186 - DNA, 21 bp, Artificial Sequence
  Description of Artificial Sequence: Synthetic oligonucleotide
tatgcgccgggtcttcggagt

SEQ ID NO: 28187 - DNA, 21 bp, Artificial Sequence
  Description of Artificial Sequence: Synthetic oligonucleotide
tatgcgcctcagagtgttgcg

SEQ ID NO: 28188 - DNA, 21 bp, Artificial Sequence
  Description of Artificial Sequence: Synthetic oligonucleotide
tatgctcaggcgtttcggaat

SEQ ID NO: 28189 - DNA, 21 bp, Artificial Sequence
  Description of Artificial Sequence: Synthetic oligonucleotide
tatgcgcagtattctgctgtg

SEQ ID NO: 28190 - DNA, 21 bp, Artificial Sequence
  Description of Artificial Sequence: Synthetic oligonucleotide
tatgctcgggaggctcatgcg

SEQ ID NO: 28191 - DNA, 21 bp, Artificial Sequence
  Description of Artificial Sequence: Synthetic oligonucleotide
tatgctcgggagactttgcat

SEQ ID NO: 28192 - DNA, 21 bp, Artificial Sequence
  Description of Artificial Sequence: Synthetic oligonucleotide
tatgcgaggttgactgggcct

SEQ ID NO: 28193 - DNA, 21 bp, Artificial Sequence
  Description of Artificial Sequence: Synthetic oligonucleotide
tatgcgcggcagattactgct

SEQ ID NO: 28194 - DNA, 21 bp, Artificial Sequence
  Description of Artificial Sequence: Synthetic oligonucleotide
tatgctcggcagcctgctgtg

SEQ ID NO: 28195 - DNA, 21 bp, Artificial Sequence
  Description of Artificial Sequence: Synthetic oligonucleotide
tatgcgtcggcttctcatcct

SEQ ID NO: 28196 - DNA, 21 bp, Artificial Sequence
  Description of Artificial Sequence: Synthetic oligonucleotide
tatgctagtcttaagggtgct

SEQ ID NO: 28197 - DNA, 21 bp, Artificial Sequence
  Description of Artificial Sequence: Synthetic oligonucleotide
tatgcgtcgcctgggcggact

SEQ ID NO: 28198 - DNA, 21 bp, Artificial Sequence
  Description of Artificial Sequence: Synthetic oligonucleotide
tatgcttcttctgcggcgctt

SEQ ID NO: 28199 - DNA, 21 bp, Artificial Sequence
  Description of Artificial Sequence: Synthetic oligonucleotide
tatgcgtcgtcgagtactcgg

SEQ ID NO: 28200 - DNA, 21 bp, Artificial Sequence
  Description of Artificial Sequence: Synthetic oligonucleotide
tatgctactgagtctgggaat

SEQ ID NO: 28201 - DNA, 21 bp, Artificial Sequence
  Description of Artificial Sequence: Synthetic oligonucleotide
tatgctacttttgcgccggct

SEQ ID NO: 28202 - DNA, 21 bp, Artificial Sequence
  Description of Artificial Sequence: Synthetic oligonucleotide
tatgctacgcatgagccggat

SEQ ID NO: 28203 - DNA, 21 bp, Artificial Sequence
  Description of Artificial Sequence: Synthetic oligonucleotide
tatgctactccgagtcatcat

SEQ ID NO: 28204 - DNA, 21 bp, Artificial Sequence
  Description of Artificial Sequence: Synthetic oligonucleotide
tatgcgacgactgtgttgact

SEQ ID NO: 28205 - DNA, 21 bp, Artificial Sequence
  Description of Artificial Sequence: Synthetic oligonucleotide
tatgctactgtgattggtctg

SEQ ID NO: 28206 - DNA, 21 bp, Artificial Sequence
  Description of Artificial Sequence: Synthetic oligonucleotide
tatgctgttgaggcttcgcgg

SEQ ID NO: 28207 - DNA, 21 bp, Artificial Sequence
  Description of Artificial Sequence: Synthetic oligonucleotide
tatgcggtggagggtaagaat

SEQ ID NO: 28208 - DNA, 21 bp, Artificial Sequence
  Description of Artificial Sequence: Synthetic oligonucleotide
tatgctgtttctaggcctctt

SEQ ID NO: 28209 - DNA, 21 bp, Artificial Sequence
  Description of Artificial Sequence: Synthetic oligonucleotide
tatgcgtatgagggttttgct

SEQ ID NO: 28210 - DNA, 21 bp, Artificial Sequence
  Description of Artificial Sequence: Synthetic oligonucleotide
tatgcttatgagcgtcagatt

SEQ ID NO: 28211 - DNA, 21 bp, Artificial Sequence
  Description of Artificial Sequence: Synthetic oligonucleotide
tattgtgagagttttcctgat

SEQ ID NO: 28212 - DNA, 21 bp, Artificial Sequence
  Description of Artificial Sequence: Synthetic oligonucleotide
tattgttctcatcagagtgtg

SEQ ID NO: 28213 - DNA, 21 bp, Artificial Sequence
  Description of Artificial Sequence: Synthetic oligonucleotide
tattgtactgggaatgatgct

SEQ ID NO: 28214 - DNA, 21 bp, Artificial Sequence
  Description of Artificial Sequence: Synthetic oligonucleotide
tatgatgcgattagtaatccg

SEQ ID NO: 28215 - DNA, 21 bp, Artificial Sequence
  Description of Artificial Sequence: Synthetic oligonucleotide
tatgatcatgttattgctacg

SEQ ID NO: 28216 - DNA, 21 bp, Artificial Sequence
  Description of Artificial Sequence: Synthetic oligonucleotide
tatgataaggcgatgagtccg

SEQ ID NO: 28217 - DNA, 21 bp, Artificial Sequence
  Description of Artificial Sequence: Synthetic oligonucleotide
tatgatcttggggttacgact

SEQ ID NO: 28218 - DNA, 21 bp, Artificial Sequence
  Description of Artificial Sequence: Synthetic oligonucleotide
tatgatatggggccggttcct

SEQ ID NO: 28219 - DNA, 21 bp, Artificial Sequence
  Description of Artificial Sequence: Synthetic oligonucleotide
tatgataataagacgcggctg

SEQ ID NO: 28220 - DNA, 21 bp, Artificial Sequence
  Description of Artificial Sequence: Synthetic oligonucleotide
tatgataatatgcattgtaag

SEQ ID NO: 28221 - DNA, 21 bp, Artificial Sequence
  Description of Artificial Sequence: Synthetic oligonucleotide
tatgataatcagttgaataat

SEQ ID NO: 28222 - DNA, 21 bp, Artificial Sequence
  Description of Artificial Sequence: Synthetic oligonucleotide
tatgatccgtatcattctcct

SEQ ID NO: 28223 - DNA, 21 bp, Artificial Sequence
  Description of Artificial Sequence: Synthetic oligonucleotide
tatgatagggagccgcttgat

SEQ ID NO: 28224 - DNA, 21 bp, Artificial Sequence
  Description of Artificial Sequence: Synthetic oligonucleotide
tatgattctaatacggagacg

SEQ ID NO: 28225 - DNA, 21 bp, Artificial Sequence
  Description of Artificial Sequence: Synthetic oligonucleotide
tatgattctcgtgggccggct

SEQ ID NO: 28226 - DNA, 21 bp, Artificial Sequence
  Description of Artificial Sequence: Synthetic oligonucleotide
tatgattcgagtgtgcctaat

SEQ ID NO: 28227 - DNA, 21 bp, Artificial Sequence
  Description of Artificial Sequence: Synthetic oligonucleotide
tatgattcggttgctactttg

SEQ ID NO: 28228 - DNA, 21 bp, Artificial Sequence
  Description of Artificial Sequence: Synthetic oligonucleotide
tatgatacgcatggttctccg

SEQ ID NO: 28229 - DNA, 21 bp, Artificial Sequence
  Description of Artificial Sequence: Synthetic oligonucleotide
tatgatactaagctgcagatg

SEQ ID NO: 28230 - DNA, 21 bp, Artificial Sequence
  Description of Artificial Sequence: Synthetic oligonucleotide
tatgaggcgccgacgcggtct

SEQ ID NO: 28231 - DNA, 21 bp, Artificial Sequence
  Description of Artificial Sequence: Synthetic oligonucleotide
tatgaggcgacgtcgagtaat

SEQ ID NO: 28232 - DNA, 21 bp, Artificial Sequence
  Description of Artificial Sequence: Synthetic oligonucleotide
tatgagggttcgcctcgtaat

SEQ ID NO: 28233 - DNA, 21 bp, Artificial Sequence
  Description of Artificial Sequence: Synthetic oligonucleotide
tatgaggggtataagcttcct

SEQ ID NO: 28234 - DNA, 21 bp, Artificial Sequence
  Description of Artificial Sequence: Synthetic oligonucleotide
tatgagattcaggggactggt

SEQ ID NO: 28235 - DNA, 21 bp, Artificial Sequence
  Description of Artificial Sequence: Synthetic oligonucleotide
tatgagcttgctcatcatgct

SEQ ID NO: 28236 - DNA, 21 bp, Artificial Sequence
  Description of Artificial Sequence: Synthetic oligonucleotide
tatgagttgcagctgttttcg

SEQ ID NO: 28237 - DNA, 21 bp, Artificial Sequence
  Description of Artificial Sequence: Synthetic oligonucleotide
tatgagttgcggaggattccg

SEQ ID NO: 28238 - DNA, 21 bp, Artificial Sequence
  Description of Artificial Sequence: Synthetic oligonucleotide
tatgagccggggactgatgcg

SEQ ID NO: 28239 - DNA, 21 bp, Artificial Sequence
  Description of Artificial Sequence: Synthetic oligonucleotide
tatgagcctaaggtgcgtgtg

SEQ ID NO: 28240 - DNA, 21 bp, Artificial Sequence
  Description of Artificial Sequence: Synthetic oligonucleotide
tatgagtcgtcgaatgatcct

SEQ ID NO: 28241 - DNA, 21 bp, Artificial Sequence
  Description of Artificial Sequence: Synthetic oligonucleotide
tatgagtcttatattgagcgg

SEQ ID NO: 28242 - DNA, 21 bp, Artificial Sequence
  Description of Artificial Sequence: Synthetic oligonucleotide
tatgagactgcttttcgggcg

SEQ ID NO: 28243 - DNA, 21 bp, Artificial Sequence
  Description of Artificial Sequence: Synthetic oligonucleotide
tatgagactgatattagtcag

SEQ ID NO: 28244 - DNA, 21 bp, Artificial Sequence
  Description of Artificial Sequence: Synthetic oligonucleotide
tatgagactgagcttcgggct

SEQ ID NO: 28245 - DNA, 21 bp, Artificial Sequence
  Description of Artificial Sequence: Synthetic oligonucleotide
tattttgcgggtcggactgat

SEQ ID NO: 28246 - DNA, 21 bp, Artificial Sequence
  Description of Artificial Sequence: Synthetic oligonucleotide
tattttgctagtcctacttcg

SEQ ID NO: 28247 - DNA, 21 bp, Artificial Sequence
  Description of Artificial Sequence: Synthetic oligonucleotide
tattttgaggcttcttcggcg

SEQ ID NO: 28248 - DNA, 21 bp, Artificial Sequence
  Description of Artificial Sequence: Synthetic oligonucleotide
tattttggttcttcggctacg

SEQ ID NO: 28249 - DNA, 21 bp, Artificial Sequence
  Description of Artificial Sequence: Synthetic oligonucleotide
tattttggttcgtctgatccg

SEQ ID NO: 28250 - DNA, 21 bp, Artificial Sequence
  Description of Artificial Sequence: Synthetic oligonucleotide
tattttcatctggcgacttcg

SEQ ID NO: 28251 - DNA, 21 bp, Artificial Sequence
  Description of Artificial Sequence: Synthetic oligonucleotide
tattttccgtcgatggtggat

SEQ ID NO: 28252 - DNA, 21 bp, Artificial Sequence
  Description of Artificial Sequence: Synthetic oligonucleotide
tatttttcgcatgatgagact

SEQ ID NO: 28253 - DNA, 21 bp, Artificial Sequence
  Description of Artificial Sequence: Synthetic oligonucleotide
tattttactaatgatagtgtg

SEQ ID NO: 28254 - DNA, 21 bp, Artificial Sequence
  Description of Artificial Sequence: Synthetic oligonucleotide
tattttactagtcgtagtgag

SEQ ID NO: 28255 - DNA, 21 bp, Artificial Sequence
  Description of Artificial Sequence: Synthetic oligonucleotide
tattttgtggctaataatcct

SEQ ID NO: 28256 - DNA, 21 bp, Artificial Sequence
  Description of Artificial Sequence: Synthetic oligonucleotide
tattttgttaagattcttatt

SEQ ID NO: 28257 - DNA, 21 bp, Artificial Sequence
  Description of Artificial Sequence: Synthetic oligonucleotide
tatggtgcgagtccggatacg

SEQ ID NO: 28258 - DNA, 21 bp, Artificial Sequence
  Description of Artificial Sequence: Synthetic oligonucleotide
tatggtgcggtggcgaagcat

SEQ ID NO: 28259 - DNA, 21 bp, Artificial Sequence
  Description of Artificial Sequence: Synthetic oligonucleotide
tatggtgctgtgcgtcataat

SEQ ID NO: 28260 - DNA, 21 bp, Artificial Sequence
  Description of Artificial Sequence: Synthetic oligonucleotide
tatggtgctgtgagtccggtg

SEQ ID NO: 28261 - DNA, 21 bp, Artificial Sequence
  Description of Artificial Sequence: Synthetic oligonucleotide
tatggtgatcctgggccgcct

SEQ ID NO: 28262 - DNA, 21 bp, Artificial Sequence
  Description of Artificial Sequence: Synthetic oligonucleotide
tatggtgatgttgctgatagt

SEQ ID NO: 28263 - DNA, 21 bp, Artificial Sequence
  Description of Artificial Sequence: Synthetic oligonucleotide
tatggggagccgattcgtccg

SEQ ID NO: 28264 - DNA, 21 bp, Artificial Sequence
  Description of Artificial Sequence: Synthetic oligonucleotide
tatgggggtgctgggagtttg

SEQ ID NO: 28265 - DNA, 21 bp, Artificial Sequence
  Description of Artificial Sequence: Synthetic oligonucleotide
tatgggggtcatactgttagt

SEQ ID NO: 28266 - DNA, 21 bp, Artificial Sequence
  Description of Artificial Sequence: Synthetic oligonucleotide
tatggtgggcctaatatgact

SEQ ID NO: 28267 - DNA, 21 bp, Artificial Sequence
  Description of Artificial Sequence: Synthetic oligonucleotide
tatgggatttcgccgaagacg

SEQ ID NO: 28268 - DNA, 21 bp, Artificial Sequence
  Description of Artificial Sequence: Synthetic oligonucleotide
tatggtaagatgacgagtgat

SEQ ID NO: 28269 - DNA, 21 bp, Artificial Sequence
  Description of Artificial Sequence: Synthetic oligonucleotide
tatgggctgaagtcggcgatt

SEQ ID NO: 28270 - DNA, 21 bp, Artificial Sequence
  Description of Artificial Sequence: Synthetic oligonucleotide
tatgggctgtcggcgcattcg

SEQ ID NO: 28271 - DNA, 21 bp, Artificial Sequence
  Description of Artificial Sequence: Synthetic oligonucleotide
tatggtatgaaggtggctcag

SEQ ID NO: 28272 - DNA, 21 bp, Artificial Sequence
  Description of Artificial Sequence: Synthetic oligonucleotide
tatgggatgtcgtttaaggag

SEQ ID NO: 28273 - DNA, 21 bp, Artificial Sequence
  Description of Artificial Sequence: Synthetic oligonucleotide
tatggtaatgctcgtgcggtt

SEQ ID NO: 28274 - DNA, 21 bp, Artificial Sequence
  Description of Artificial Sequence: Synthetic oligonucleotide
tatgggaatgggagtcttggt

SEQ ID NO: 28275 - DNA, 21 bp, Artificial Sequence
  Description of Artificial Sequence: Synthetic oligonucleotide
tatggtaatcatcttttgtct

SEQ ID NO: 28276 - DNA, 21 bp, Artificial Sequence
  Description of Artificial Sequence: Synthetic oligonucleotide
tatgggcctgcgttgcttagt

SEQ ID NO: 28277 - DNA, 21 bp, Artificial Sequence
  Description of Artificial Sequence: Synthetic oligonucleotide
tatggtcctgatcttcgtcag

SEQ ID NO: 28278 - DNA, 21 bp, Artificial Sequence
  Description of Artificial Sequence: Synthetic oligonucleotide
tatggtccgcatgcgaagagt

SEQ ID NO: 28279 - DNA, 21 bp, Artificial Sequence
  Description of Artificial Sequence: Synthetic oligonucleotide
tatgggcagagtggggcttct

SEQ ID NO: 28280 - DNA, 21 bp, Artificial Sequence
  Description of Artificial Sequence: Synthetic oligonucleotide
tatggtcagtctaagagtagt

SEQ ID NO: 28281 - DNA, 21 bp, Artificial Sequence
  Description of Artificial Sequence: Synthetic oligonucleotide
tatggtcgtaatatgacgcag

SEQ ID NO: 28282 - DNA, 21 bp, Artificial Sequence
  Description of Artificial Sequence: Synthetic oligonucleotide
tatgggcggtctcagtcgctg

SEQ ID NO: 28283 - DNA, 21 bp, Artificial Sequence
  Description of Artificial Sequence: Synthetic oligonucleotide
tatggttcgttgaatattgct

SEQ ID NO: 28284 - DNA, 21 bp, Artificial Sequence
  Description of Artificial Sequence: Synthetic oligonucleotide
tatggttcgcctcgtgtgacg

SEQ ID NO: 28285 - DNA, 21 bp, Artificial Sequence
  Description of Artificial Sequence: Synthetic oligonucleotide
tatgggtcttcgtgtcatacg

SEQ ID NO: 28286 - DNA, 21 bp, Artificial Sequence
  Description of Artificial Sequence: Synthetic oligonucleotide
tatggttcttcgcgtacgacg

SEQ ID NO: 28287 - DNA, 21 bp, Artificial Sequence
  Description of Artificial Sequence: Synthetic oligonucleotide
tatggtactgcgactcaggcg

SEQ ID NO: 28288 - DNA, 21 bp, Artificial Sequence
  Description of Artificial Sequence: Synthetic oligonucleotide
tatggtacggagactaattat

SEQ ID NO: 28289 - DNA, 21 bp, Artificial Sequence
  Description of Artificial Sequence: Synthetic oligonucleotide
tatgggacgggtgggcatctg

SEQ ID NO: 28290 - DNA, 21 bp, Artificial Sequence
  Description of Artificial Sequence: Synthetic oligonucleotide
tatggtacgcttgctcggcat

SEQ ID NO: 28291 - DNA, 21 bp, Artificial Sequence
  Description of Artificial Sequence: Synthetic oligonucleotide
tatggggttcgtccgagtacg

SEQ ID NO: 28292 - DNA, 21 bp, Artificial Sequence
  Description of Artificial Sequence: Synthetic oligonucleotide
tatggttatgctgctttgaat

SEQ ID NO: 28293 - DNA, 21 bp, Artificial Sequence
  Description of Artificial Sequence: Synthetic oligonucleotide
tatcatgcggggcctccggat

SEQ ID NO: 28294 - DNA, 21 bp, Artificial Sequence
  Description of Artificial Sequence: Synthetic oligonucleotide
tatcatgggaggactgtggtt

SEQ ID NO: 28295 - DNA, 21 bp, Artificial Sequence
  Description of Artificial Sequence: Synthetic oligonucleotide
tatcataagacgggggttcat

SEQ ID NO: 28296 - DNA, 21 bp, Artificial Sequence
  Description of Artificial Sequence: Synthetic oligonucleotide
tatcatatgacggttaagtct

SEQ ID NO: 28297 - DNA, 21 bp, Artificial Sequence
  Description of Artificial Sequence: Synthetic oligonucleotide
tatcataatcatggtactagt

SEQ ID NO: 28298 - DNA, 21 bp, Artificial Sequence
  Description of Artificial Sequence: Synthetic oligonucleotide
tatcataatctgcagggtatg

SEQ ID NO: 28299 - DNA, 21 bp, Artificial Sequence
  Description of Artificial Sequence: Synthetic oligonucleotide
tatcataataattcgtcgcct

SEQ ID NO: 28300 - DNA, 21 bp, Artificial Sequence
  Description of Artificial Sequence: Synthetic oligonucleotide
tatcatcctcctcgtgagaat

SEQ ID NO: 28301 - DNA, 21 bp, Artificial Sequence
  Description of Artificial Sequence: Synthetic oligonucleotide
tatcatcctgtgattgcgcct

SEQ ID NO: 28302 - DNA, 21 bp, Artificial Sequence
  Description of Artificial Sequence: Synthetic oligonucleotide
tatcatagtgaggttcgtgct

SEQ ID NO: 28303 - DNA, 21 bp, Artificial Sequence
  Description of Artificial Sequence: Synthetic oligonucleotide
tatcatagtaatacgacttcg

SEQ ID NO: 28304 - DNA, 21 bp, Artificial Sequence
  Description of Artificial Sequence: Synthetic oligonucleotide
tatcatagtgtttctacgagt

SEQ ID NO: 28305 - DNA, 21 bp, Artificial Sequence
  Description of Artificial Sequence: Synthetic oligonucleotide
tatcatactgcgtcgatgaat

SEQ ID NO: 28306 - DNA, 21 bp, Artificial Sequence
  Description of Artificial Sequence: Synthetic oligonucleotide
tatcatactttgaataaggat

SEQ ID NO: 28307 - DNA, 21 bp, Artificial Sequence
  Description of Artificial Sequence: Synthetic oligonucleotide
tatcatactgtttctagtaat

SEQ ID NO: 28308 - DNA, 21 bp, Artificial Sequence
  Description of Artificial Sequence: Synthetic oligonucleotide
tatcatgtgagggcggcgtct

SEQ ID NO: 28309 - DNA, 21 bp, Artificial Sequence
  Description of Artificial Sequence: Synthetic oligonucleotide
tatattgagactcgtgttacg

SEQ ID NO: 28310 - DNA, 21 bp, Artificial Sequence
  Description of Artificial Sequence: Synthetic oligonucleotide
tatattggtgagcgggatcct

SEQ ID NO: 28311 - DNA, 21 bp, Artificial Sequence
  Description of Artificial Sequence: Synthetic oligonucleotide
tatattggtccggatctggct

SEQ ID NO: 28312 - DNA, 21 bp, Artificial Sequence
  Description of Artificial Sequence: Synthetic oligonucleotide
tatattcatccggagcaggag

SEQ ID NO: 28313 - DNA, 21 bp, Artificial Sequence
  Description of Artificial Sequence: Synthetic oligonucleotide
tatattattgctcaggagtgt

SEQ ID NO: 28314 - DNA, 21 bp, Artificial Sequence
  Description of Artificial Sequence: Synthetic oligonucleotide
tatattcttacttctgagact

SEQ ID NO: 28315 - DNA, 21 bp, Artificial Sequence
  Description of Artificial Sequence: Synthetic oligonucleotide
tatattaatgctcttattgcg

SEQ ID NO: 28316 - DNA, 21 bp, Artificial Sequence
  Description of Artificial Sequence: Synthetic oligonucleotide
tatattccgtcgaagtttact

SEQ ID NO: 28317 - DNA, 21 bp, Artificial Sequence
  Description of Artificial Sequence: Synthetic oligonucleotide
tatattcaggttcctaagggg

SEQ ID NO: 28318 - DNA, 21 bp, Artificial Sequence
  Description of Artificial Sequence: Synthetic oligonucleotide
tatatttctgcggggacttcg

SEQ ID NO: 28319 - DNA, 21 bp, Artificial Sequence
  Description of Artificial Sequence: Synthetic oligonucleotide
tatatttcgccggtttctgtg

SEQ ID NO: 28320 - DNA, 21 bp, Artificial Sequence
  Description of Artificial Sequence: Synthetic oligonucleotide
tataaggctgcttcggttcct

SEQ ID NO: 28321 - DNA, 21 bp, Artificial Sequence
  Description of Artificial Sequence: Synthetic oligonucleotide
tataagggtgctcctgttact

SEQ ID NO: 28322 - DNA, 21 bp, Artificial Sequence
  Description of Artificial Sequence: Synthetic oligonucleotide
tataagggtgcttcgctggat

SEQ ID NO: 28323 - DNA, 21 bp, Artificial Sequence
  Description of Artificial Sequence: Synthetic oligonucleotide
tataagggtggtaattcgttt

SEQ ID NO: 28324 - DNA, 21 bp, Artificial Sequence
  Description of Artificial Sequence: Synthetic oligonucleotide
tataagttgaatgcgacgtat

SEQ ID NO: 28325 - DNA, 21 bp, Artificial Sequence
  Description of Artificial Sequence: Synthetic oligonucleotide
tataagcttcagcaggtgtcg

SEQ ID NO: 28326 - DNA, 21 bp, Artificial Sequence
  Description of Artificial Sequence: Synthetic oligonucleotide
tataagccggcgaatgtgaat

SEQ ID NO: 28327 - DNA, 21 bp, Artificial Sequence
  Description of Artificial Sequence: Synthetic oligonucleotide
tataagccgagtgaggggacg

SEQ ID NO: 28328 - DNA, 21 bp, Artificial Sequence
  Description of Artificial Sequence: Synthetic oligonucleotide
tataagcagcatgtgatttcg

SEQ ID NO: 28329 - DNA, 21 bp, Artificial Sequence
  Description of Artificial Sequence: Synthetic oligonucleotide
tataagtcgtcggctggtagt

SEQ ID NO: 28330 - DNA, 21 bp, Artificial Sequence
  Description of Artificial Sequence: Synthetic oligonucleotide
tataagacgggtcgtctggct

SEQ ID NO: 28331 - DNA, 21 bp, Artificial Sequence
  Description of Artificial Sequence: Synthetic oligonucleotide
tataaggttttgccttctgct

SEQ ID NO: 28332 - DNA, 21 bp, Artificial Sequence
  Description of Artificial Sequence: Synthetic oligonucleotide
tatcttgctggtgagaggact

SEQ ID NO: 28333 - DNA, 21 bp, Artificial Sequence
  Description of Artificial Sequence: Synthetic oligonucleotide
tatcttgctcatgggcttcag

SEQ ID NO: 28334 - DNA, 21 bp, Artificial Sequence
  Description of Artificial Sequence: Synthetic oligonucleotide
tatttggcgcttcagtataag

SEQ ID NO: 28335 - DNA, 21 bp, Artificial Sequence
  Description of Artificial Sequence: Synthetic oligonucleotide
tatttggatcatatttgggag

SEQ ID NO: 28336 - DNA, 21 bp, Artificial Sequence
  Description of Artificial Sequence: Synthetic oligonucleotide
tatctggatacttcgcctgtt

SEQ ID NO: 28337 - DNA, 21 bp, Artificial Sequence
  Description of Artificial Sequence: Synthetic oligonucleotide
tatttggagcggtatgggtct

SEQ ID NO: 28338 - DNA, 21 bp, Artificial Sequence
  Description of Artificial Sequence: Synthetic oligonucleotide
tatcttggtgataagatggct

SEQ ID NO: 28339 - DNA, 21 bp, Artificial Sequence
  Description of Artificial Sequence: Synthetic oligonucleotide
tatcttgggcattcgacgaag

SEQ ID NO: 28340 - DNA, 21 bp, Artificial Sequence
  Description of Artificial Sequence: Synthetic oligonucleotide
tatcttggtacgcaggttaat

SEQ ID NO: 28341 - DNA, 21 bp, Artificial Sequence
  Description of Artificial Sequence: Synthetic oligonucleotide
tatttgaagtttactgattct

SEQ ID NO: 28342 - DNA, 21 bp, Artificial Sequence
  Description of Artificial Sequence: Synthetic oligonucleotide
tatttgaagtcgaattcgcct

SEQ ID NO: 28343 - DNA, 21 bp, Artificial Sequence
  Description of Artificial Sequence: Synthetic oligonucleotide
tatttgctttctgagctttct

SEQ ID NO: 28344 - DNA, 21 bp, Artificial Sequence
  Description of Artificial Sequence: Synthetic oligonucleotide
tatttgctgtctcatgctggg

SEQ ID NO: 28345 - DNA, 21 bp, Artificial Sequence
  Description of Artificial Sequence: Synthetic oligonucleotide
tatttgatgcatgcgtcggcg

SEQ ID NO: 28346 - DNA, 21 bp, Artificial Sequence
  Description of Artificial Sequence: Synthetic oligonucleotide
tatttgaatgtgacgcctgct

SEQ ID NO: 28347 - DNA, 21 bp, Artificial Sequence
  Description of Artificial Sequence: Synthetic oligonucleotide
tatcttcctaagtctaatttt

SEQ ID NO: 28348 - DNA, 21 bp, Artificial Sequence
  Description of Artificial Sequence: Synthetic oligonucleotide
tatctgccgttgactgctgtg

SEQ ID NO: 28349 - DNA, 21 bp, Artificial Sequence
  Description of Artificial Sequence: Synthetic oligonucleotide
tatttgccgcgtggtacgttt

SEQ ID NO: 28350 - DNA, 21 bp, Artificial Sequence
  Description of Artificial Sequence: Synthetic oligonucleotide
tatttgccgcgtggtacgtct

SEQ ID NO: 28351 - DNA, 21 bp, Artificial Sequence
  Description of Artificial Sequence: Synthetic oligonucleotide
tatcttccgacgaggcatgag

SEQ ID NO: 28352 - DNA, 21 bp, Artificial Sequence
  Description of Artificial Sequence: Synthetic oligonucleotide
tatcttcaggcgcattataat

SEQ ID NO: 28353 - DNA, 21 bp, Artificial Sequence
  Description of Artificial Sequence: Synthetic oligonucleotide
tatcttcagcatgggcatacg

SEQ ID NO: 28354 - DNA, 21 bp, Artificial Sequence
  Description of Artificial Sequence: Synthetic oligonucleotide
tatcttcagacggaggatcct

SEQ ID NO: 28355 - DNA, 21 bp, Artificial Sequence
  Description of Artificial Sequence: Synthetic oligonucleotide
tatttgaggcttcagactggt

SEQ ID NO: 28356 - DNA, 21 bp, Artificial Sequence
  Description of Artificial Sequence: Synthetic oligonucleotide
tatttgaggccgcagtctggg

SEQ ID NO: 28357 - DNA, 21 bp, Artificial Sequence
  Description of Artificial Sequence: Synthetic oligonucleotide
tatctttcggatcctcggatg

SEQ ID NO: 28358 - DNA, 21 bp, Artificial Sequence
  Description of Artificial Sequence: Synthetic oligonucleotide
tatttgtcgggtatgattaag

SEQ ID NO: 28359 - DNA, 21 bp, Artificial Sequence
  Description of Artificial Sequence: Synthetic oligonucleotide
tatctgtctcataggtctgag

SEQ ID NO: 28360 - DNA, 21 bp, Artificial Sequence
  Description of Artificial Sequence: Synthetic oligonucleotide
tatttgtctaatactgagatg

SEQ ID NO: 28361 - DNA, 21 bp, Artificial Sequence
  Description of Artificial Sequence: Synthetic oligonucleotide
tatttgtctgttgatgagtct

SEQ ID NO: 28362 - DNA, 21 bp, Artificial Sequence
  Description of Artificial Sequence: Synthetic oligonucleotide
tatcttagtgttcagtcgaat

SEQ ID NO: 28363 - DNA, 21 bp, Artificial Sequence
  Description of Artificial Sequence: Synthetic oligonucleotide
tatcttactaagcatacttcg

SEQ ID NO: 28364 - DNA, 21 bp, Artificial Sequence
  Description of Artificial Sequence: Synthetic oligonucleotide
tatcttactcagctgtcgacg

SEQ ID NO: 28365 - DNA, 21 bp, Artificial Sequence
  Description of Artificial Sequence: Synthetic oligonucleotide
tatcttgttgagacgactaag

SEQ ID NO: 28366 - DNA, 21 bp, Artificial Sequence
  Description of Artificial Sequence: Synthetic oligonucleotide
tatctggtgggtcagcgtgtg

SEQ ID NO: 28367 - DNA, 21 bp, Artificial Sequence
  Description of Artificial Sequence: Synthetic oligonucleotide
tatatggatactgatgatcgt

SEQ ID NO: 28368 - DNA, 21 bp, Artificial Sequence
  Description of Artificial Sequence: Synthetic oligonucleotide
tatatggggcatgctctttcg

SEQ ID NO: 28369 - DNA, 21 bp, Artificial Sequence
  Description of Artificial Sequence: Synthetic oligonucleotide
tatatgcatgcgtctaatgtg

SEQ ID NO: 28370 - DNA, 21 bp, Artificial Sequence
  Description of Artificial Sequence: Synthetic oligonucleotide
tatatgcatggttcgcatgct

SEQ ID NO: 28371 - DNA, 21 bp, Artificial Sequence
  Description of Artificial Sequence: Synthetic oligonucleotide
tatatgcattcgcctacgccg

SEQ ID NO: 28372 - DNA, 21 bp, Artificial Sequence
  Description of Artificial Sequence: Synthetic oligonucleotide
tatatgcattcgtcgaggacg

SEQ ID NO: 28373 - DNA, 21 bp, Artificial Sequence
  Description of Artificial Sequence: Synthetic oligonucleotide
tatatgcattatacggttacg

SEQ ID NO: 28374 - DNA, 21 bp, Artificial Sequence
  Description of Artificial Sequence: Synthetic oligonucleotide
tatatgcctgctcctgttcag

SEQ ID NO: 28375 - DNA, 21 bp, Artificial Sequence
  Description of Artificial Sequence: Synthetic oligonucleotide
tatatgcagacgcgggatact

SEQ ID NO: 28376 - DNA, 21 bp, Artificial Sequence
  Description of Artificial Sequence: Synthetic oligonucleotide
tatatgcaggttttttctccg

SEQ ID NO: 28377 - DNA, 21 bp, Artificial Sequence
  Description of Artificial Sequence: Synthetic oligonucleotide
tatatgtcggcgattcggatg

SEQ ID NO: 28378 - DNA, 21 bp, Artificial Sequence
  Description of Artificial Sequence: Synthetic oligonucleotide
tatatgtcggcgactacgcgt

SEQ ID NO: 28379 - DNA, 21 bp, Artificial Sequence
  Description of Artificial Sequence: Synthetic oligonucleotide
tatatgtctcggacggcttct

SEQ ID NO: 28380 - DNA, 21 bp, Artificial Sequence
  Description of Artificial Sequence: Synthetic oligonucleotide
tatatgtcggttacgcagcag

SEQ ID NO: 28381 - DNA, 21 bp, Artificial Sequence
  Description of Artificial Sequence: Synthetic oligonucleotide
tatatgactggtcgtccgcat

SEQ ID NO: 28382 - DNA, 21 bp, Artificial Sequence
  Description of Artificial Sequence: Synthetic oligonucleotide
tatatgactaagaattttggg

SEQ ID NO: 28383 - DNA, 21 bp, Artificial Sequence
  Description of Artificial Sequence: Synthetic oligonucleotide
tatatgacgaatcttcagcct

SEQ ID NO: 28384 - DNA, 21 bp, Artificial Sequence
  Description of Artificial Sequence: Synthetic oligonucleotide
tatatgactagtcagagtcgt

SEQ ID NO: 28385 - DNA, 21 bp, Artificial Sequence
  Description of Artificial Sequence: Synthetic oligonucleotide
tatatgtatgatggttcggtt

SEQ ID NO: 28386 - DNA, 21 bp, Artificial Sequence
  Description of Artificial Sequence: Synthetic oligonucleotide
tataatgcggcttctgggctg

SEQ ID NO: 28387 - DNA, 21 bp, Artificial Sequence
  Description of Artificial Sequence: Synthetic oligonucleotide
tataatgctggtggtcctagg

SEQ ID NO: 28388 - DNA, 21 bp, Artificial Sequence
  Description of Artificial Sequence: Synthetic oligonucleotide
tataatgcgcttcttcagcct

SEQ ID NO: 28389 - DNA, 21 bp, Artificial Sequence
  Description of Artificial Sequence: Synthetic oligonucleotide
tataatgatgttatgagtaat

SEQ ID NO: 28390 - DNA, 21 bp, Artificial Sequence
  Description of Artificial Sequence: Synthetic oligonucleotide
tataatgggaatctgcgtttg

SEQ ID NO: 28391 - DNA, 21 bp, Artificial Sequence
  Description of Artificial Sequence: Synthetic oligonucleotide
tataatggtcagcatattgcg

SEQ ID NO: 28392 - DNA, 21 bp, Artificial Sequence
  Description of Artificial Sequence: Synthetic oligonucleotide
tataatattggtacgtctaat

SEQ ID NO: 28393 - DNA, 21 bp, Artificial Sequence
  Description of Artificial Sequence: Synthetic oligonucleotide
tataatattaatcagctgact

SEQ ID NO: 28394 - DNA, 21 bp, Artificial Sequence
  Description of Artificial Sequence: Synthetic oligonucleotide
tataatctgcgtccgctgcag

SEQ ID NO: 28395 - DNA, 21 bp, Artificial Sequence
  Description of Artificial Sequence: Synthetic oligonucleotide
tataatttgagtggtccttcg

SEQ ID NO: 28396 - DNA, 21 bp, Artificial Sequence
  Description of Artificial Sequence: Synthetic oligonucleotide
tataatcttagtaatcctgct

SEQ ID NO: 28397 - DNA, 21 bp, Artificial Sequence
  Description of Artificial Sequence: Synthetic oligonucleotide
tataatcttagtgttgggttt

SEQ ID NO: 28398 - DNA, 21 bp, Artificial Sequence
  Description of Artificial Sequence: Synthetic oligonucleotide
tataataattctaatactact

SEQ ID NO: 28399 - DNA, 21 bp, Artificial Sequence
  Description of Artificial Sequence: Synthetic oligonucleotide
tataatcctcttaatcagcgt

SEQ ID NO: 28400 - DNA, 21 bp, Artificial Sequence
  Description of Artificial Sequence: Synthetic oligonucleotide
tataatccgccggagccgctg

SEQ ID NO: 28401 - DNA, 21 bp, Artificial Sequence
  Description of Artificial Sequence: Synthetic oligonucleotide
tataatccgcctcggtcttct

SEQ ID NO: 28402 - DNA, 21 bp, Artificial Sequence
  Description of Artificial Sequence: Synthetic oligonucleotide
tataatcagcatggtcctcct

SEQ ID NO: 28403 - DNA, 21 bp, Artificial Sequence
  Description of Artificial Sequence: Synthetic oligonucleotide
tataatcagcttgctcgtccg

SEQ ID NO: 28404 - DNA, 21 bp, Artificial Sequence
  Description of Artificial Sequence: Synthetic oligonucleotide
tataatcagcgtcctattgtt

SEQ ID NO: 28405 - DNA, 21 bp, Artificial Sequence
  Description of Artificial Sequence: Synthetic oligonucleotide
tataatagggctaatttgtct

SEQ ID NO: 28406 - DNA, 21 bp, Artificial Sequence
  Description of Artificial Sequence: Synthetic oligonucleotide
tataataggggtcagatgcag

SEQ ID NO: 28407 - DNA, 21 bp, Artificial Sequence
  Description of Artificial Sequence: Synthetic oligonucleotide
tataatcgtgtggctacgtcg

SEQ ID NO: 28408 - DNA, 21 bp, Artificial Sequence
  Description of Artificial Sequence: Synthetic oligonucleotide
tataattcttctggggtgcct

SEQ ID NO: 28409 - DNA, 21 bp, Artificial Sequence
  Description of Artificial Sequence: Synthetic oligonucleotide
tataatagttcgtcgcttggt

SEQ ID NO: 28410 - DNA, 21 bp, Artificial Sequence
  Description of Artificial Sequence: Synthetic oligonucleotide
tataatagtacgggtctgcgg

SEQ ID NO: 28411 - DNA, 21 bp, Artificial Sequence
  Description of Artificial Sequence: Synthetic oligonucleotide
tataatactggtcggattact

SEQ ID NO: 28412 - DNA, 21 bp, Artificial Sequence
  Description of Artificial Sequence: Synthetic oligonucleotide
tataatacgattaaggcggtt

SEQ ID NO: 28413 - DNA, 21 bp, Artificial Sequence
  Description of Artificial Sequence: Synthetic oligonucleotide
tataatactcctcggatggag

SEQ ID NO: 28414 - DNA, 21 bp, Artificial Sequence
  Description of Artificial Sequence: Synthetic oligonucleotide
tataatgttgagacggataat

SEQ ID NO: 28415 - DNA, 21 bp, Artificial Sequence
  Description of Artificial Sequence: Synthetic oligonucleotide
tataatgtgtatacggtgccg

SEQ ID NO: 28416 - DNA, 21 bp, Artificial Sequence
  Description of Artificial Sequence: Synthetic oligonucleotide
tatcctgcgctggatgtgttt

SEQ ID NO: 28417 - DNA, 21 bp, Artificial Sequence
  Description of Artificial Sequence: Synthetic oligonucleotide
tatcctgctaatcgtctgctg

SEQ ID NO: 28418 - DNA, 21 bp, Artificial Sequence
  Description of Artificial Sequence: Synthetic oligonucleotide
tatcctgatagtgatctgctg

SEQ ID NO: 28419 - DNA, 21 bp, Artificial Sequence
  Description of Artificial Sequence: Synthetic oligonucleotide
tatccgtttggggatatggcg

SEQ ID NO: 28420 - DNA, 21 bp, Artificial Sequence
  Description of Artificial Sequence: Synthetic oligonucleotide
tatcctggggctactgagacg

SEQ ID NO: 28421 - DNA, 21 bp, Artificial Sequence
  Description of Artificial Sequence: Synthetic oligonucleotide
tatcctgggactaagcagatg

SEQ ID NO: 28422 - DNA, 21 bp, Artificial Sequence
  Description of Artificial Sequence: Synthetic oligonucleotide
tatcctggtgtgacggtgaag

SEQ ID NO: 28423 - DNA, 21 bp, Artificial Sequence
  Description of Artificial Sequence: Synthetic oligonucleotide
tatcctcatgctgcttcttgg

SEQ ID NO: 28424 - DNA, 21 bp, Artificial Sequence
  Description of Artificial Sequence: Synthetic oligonucleotide
tatcctcatcattcgcagcat

SEQ ID NO: 28425 - DNA, 21 bp, Artificial Sequence
  Description of Artificial Sequence: Synthetic oligonucleotide
tatcctcatactcctgcggcg

SEQ ID NO: 28426 - DNA, 21 bp, Artificial Sequence
  Description of Artificial Sequence: Synthetic oligonucleotide
tatcctattgcgactgttagg

SEQ ID NO: 28427 - DNA, 21 bp, Artificial Sequence
  Description of Artificial Sequence: Synthetic oligonucleotide
tatcctattaggccgttgggt

SEQ ID NO: 28428 - DNA, 21 bp, Artificial Sequence
  Description of Artificial Sequence: Synthetic oligonucleotide
tatcctaaggtgcctacgttt

SEQ ID NO: 28429 - DNA, 21 bp, Artificial Sequence
  Description of Artificial Sequence: Synthetic oligonucleotide
tatcctaaggtgtattcggcg

SEQ ID NO: 28430 - DNA, 21 bp, Artificial Sequence
  Description of Artificial Sequence: Synthetic oligonucleotide
tatccgctgagtacgtcggct

SEQ ID NO: 28431 - DNA, 21 bp, Artificial Sequence
  Description of Artificial Sequence: Synthetic oligonucleotide
tatcctatgccgtctccgcct

SEQ ID NO: 28432 - DNA, 21 bp, Artificial Sequence
  Description of Artificial Sequence: Synthetic oligonucleotide
tatccgaatgattcttatgcg

SEQ ID NO: 28433 - DNA, 21 bp, Artificial Sequence
  Description of Artificial Sequence: Synthetic oligonucleotide
tatccgaatcatagtcgtaat

SEQ ID NO: 28434 - DNA, 21 bp, Artificial Sequence
  Description of Artificial Sequence: Synthetic oligonucleotide
tatcctaatagtctttcgttg

SEQ ID NO: 28435 - DNA, 21 bp, Artificial Sequence
  Description of Artificial Sequence: Synthetic oligonucleotide
tatcctcctgattctcatccg

SEQ ID NO: 28436 - DNA, 21 bp, Artificial Sequence
  Description of Artificial Sequence: Synthetic oligonucleotide
tatcctcctattgcgcagggt

SEQ ID NO: 28437 - DNA, 21 bp, Artificial Sequence
  Description of Artificial Sequence: Synthetic oligonucleotide
tatcctcctaagcttgggtct

SEQ ID NO: 28438 - DNA, 21 bp, Artificial Sequence
  Description of Artificial Sequence: Synthetic oligonucleotide
tatcctccgaagtatgcgaat

SEQ ID NO: 28439 - DNA, 21 bp, Artificial Sequence
  Description of Artificial Sequence: Synthetic oligonucleotide
tatcctcctcctaaggcttcg

SEQ ID NO: 28440 - DNA, 21 bp, Artificial Sequence
  Description of Artificial Sequence: Synthetic oligonucleotide
tatcctccttctgggtataat

SEQ ID NO: 28441 - DNA, 21 bp, Artificial Sequence
  Description of Artificial Sequence: Synthetic oligonucleotide
tatccgccgactgcgcgtgcg

SEQ ID NO: 28442 - DNA, 21 bp, Artificial Sequence
  Description of Artificial Sequence: Synthetic oligonucleotide
tatccgccgactccgttgccg

SEQ ID NO: 28443 - DNA, 21 bp, Artificial Sequence
  Description of Artificial Sequence: Synthetic oligonucleotide
tatcctccgtggcataatccg

SEQ ID NO: 28444 - DNA, 21 bp, Artificial Sequence
  Description of Artificial Sequence: Synthetic oligonucleotide
tatccgcgtgatgcgtcttct

SEQ ID NO: 28445 - DNA, 21 bp, Artificial Sequence
  Description of Artificial Sequence: Synthetic oligonucleotide
tatccgcgtgagaagtctttg

SEQ ID NO: 28446 - DNA, 21 bp, Artificial Sequence
  Description of Artificial Sequence: Synthetic oligonucleotide
tatccgcggcatccttctttt

SEQ ID NO: 28447 - DNA, 21 bp, Artificial Sequence
  Description of Artificial Sequence: Synthetic oligonucleotide
tatccgcggacgcttccggag

SEQ ID NO: 28448 - DNA, 21 bp, Artificial Sequence
  Description of Artificial Sequence: Synthetic oligonucleotide
tatccgtctgcgagtagtatg

SEQ ID NO: 28449 - DNA, 21 bp, Artificial Sequence
  Description of Artificial Sequence: Synthetic oligonucleotide
tatccgagtcatttgctgaat

SEQ ID NO: 28450 - DNA, 21 bp, Artificial Sequence
  Description of Artificial Sequence: Synthetic oligonucleotide
tatcctagtccggcgggggag

SEQ ID NO: 28451 - DNA, 21 bp, Artificial Sequence
  Description of Artificial Sequence: Synthetic oligonucleotide
tatccgtcgccgagtaatttg

SEQ ID NO: 28452 - DNA, 21 bp, Artificial Sequence
  Description of Artificial Sequence: Synthetic oligonucleotide
tatccttcttcttcgatgccg

SEQ ID NO: 28453 - DNA, 21 bp, Artificial Sequence
  Description of Artificial Sequence: Synthetic oligonucleotide
tatcctacgggtgagacgccg

SEQ ID NO: 28454 - DNA, 21 bp, Artificial Sequence
  Description of Artificial Sequence: Synthetic oligonucleotide
tatcctactcatagtcatatg

SEQ ID NO: 28455 - DNA, 21 bp, Artificial Sequence
  Description of Artificial Sequence: Synthetic oligonucleotide
tatcctactaagcatcttcat

SEQ ID NO: 28456 - DNA, 21 bp, Artificial Sequence
  Description of Artificial Sequence: Synthetic oligonucleotide
tatcctactacgcctctgatg

SEQ ID NO: 28457 - DNA, 21 bp, Artificial Sequence
  Description of Artificial Sequence: Synthetic oligonucleotide
tatccggttaatgcgcctact

SEQ ID NO: 28458 - DNA, 21 bp, Artificial Sequence
  Description of Artificial Sequence: Synthetic oligonucleotide
tatccggtgcaggatgctctt

SEQ ID NO: 28459 - DNA, 21 bp, Artificial Sequence
  Description of Artificial Sequence: Synthetic oligonucleotide
tatcctgttagtactactcag

SEQ ID NO: 28460 - DNA, 21 bp, Artificial Sequence
  Description of Artificial Sequence: Synthetic oligonucleotide
tatcagggtattgctctgggg

SEQ ID NO: 28461 - DNA, 21 bp, Artificial Sequence
  Description of Artificial Sequence: Synthetic oligonucleotide
tatcagggtacgctgccttct

SEQ ID NO: 28462 - DNA, 21 bp, Artificial Sequence
  Description of Artificial Sequence: Synthetic oligonucleotide
tatcagttggataatacgccg

SEQ ID NO: 28463 - DNA, 21 bp, Artificial Sequence
  Description of Artificial Sequence: Synthetic oligonucleotide
tatcagctgcagcggtcggag

SEQ ID NO: 28464 - DNA, 21 bp, Artificial Sequence
  Description of Artificial Sequence: Synthetic oligonucleotide
tatcagttgaggcagagtccg

SEQ ID NO: 28465 - DNA, 21 bp, Artificial Sequence
  Description of Artificial Sequence: Synthetic oligonucleotide
tatcagctggtgacgcagcct

SEQ ID NO: 28466 - DNA, 21 bp, Artificial Sequence
  Description of Artificial Sequence: Synthetic oligonucleotide
tatcagcctccggatatgggt

SEQ ID NO: 28467 - DNA, 21 bp, Artificial Sequence
  Description of Artificial Sequence: Synthetic oligonucleotide
tatcagcaggatggtcgttgt

SEQ ID NO: 28468 - DNA, 21 bp, Artificial Sequence
  Description of Artificial Sequence: Synthetic oligonucleotide
tatcagagggtgagtagttcg

SEQ ID NO: 28469 - DNA, 21 bp, Artificial Sequence
  Description of Artificial Sequence: Synthetic oligonucleotide
tatcagagtgatggtaatccg

SEQ ID NO: 28470 - DNA, 21 bp, Artificial Sequence
  Description of Artificial Sequence: Synthetic oligonucleotide
tatcagactgagattactcgg

SEQ ID NO: 28471 - DNA, 21 bp, Artificial Sequence
  Description of Artificial Sequence: Synthetic oligonucleotide
tatcagacttatactcgtgag

SEQ ID NO: 28472 - DNA, 21 bp, Artificial Sequence
  Description of Artificial Sequence: Synthetic oligonucleotide
tatcaggtgaagactgggcct

SEQ ID NO: 28473 - DNA, 21 bp, Artificial Sequence
  Description of Artificial Sequence: Synthetic oligonucleotide
tatcaggtgaatgctgggatg

SEQ ID NO: 28474 - DNA, 21 bp, Artificial Sequence
  Description of Artificial Sequence: Synthetic oligonucleotide
tatcgtgctgatggtgaggcg

SEQ ID NO: 28475 - DNA, 21 bp, Artificial Sequence
  Description of Artificial Sequence: Synthetic oligonucleotide
tatcgtgctatggctccgcct

SEQ ID NO: 28476 - DNA, 21 bp, Artificial Sequence
  Description of Artificial Sequence: Synthetic oligonucleotide
tatcgtgctaattcgcctgtg

SEQ ID NO: 28477 - DNA, 21 bp, Artificial Sequence
  Description of Artificial Sequence: Synthetic oligonucleotide
tatcgggcttctggggagctt

SEQ ID NO: 28478 - DNA, 21 bp, Artificial Sequence
  Description of Artificial Sequence: Synthetic oligonucleotide
tatagggatcatgaggttctg

SEQ ID NO: 28479 - DNA, 21 bp, Artificial Sequence
  Description of Artificial Sequence: Synthetic oligonucleotide
tatcgtgatattcagcgtggg

SEQ ID NO: 28480 - DNA, 21 bp, Artificial Sequence
  Description of Artificial Sequence: Synthetic oligonucleotide
tatagggataatcgtcctaat

SEQ ID NO: 28481 - DNA, 21 bp, Artificial Sequence
  Description of Artificial Sequence: Synthetic oligonucleotide
tatcgtgattcgtcgaatatt

SEQ ID NO: 28482 - DNA, 21 bp, Artificial Sequence
  Description of Artificial Sequence: Synthetic oligonucleotide
tatcgggagatggctaatcgg

SEQ ID NO: 28483 - DNA, 21 bp, Artificial Sequence
  Description of Artificial Sequence: Synthetic oligonucleotide
tatcgtgagaatgctagggcg

SEQ ID NO: 28484 - DNA, 21 bp, Artificial Sequence
  Description of Artificial Sequence: Synthetic oligonucleotide
tatagggggattactcttgat

SEQ ID NO: 28485 - DNA, 21 bp, Artificial Sequence
  Description of Artificial Sequence: Synthetic oligonucleotide
tatcgtgggaatcatgctcct

SEQ ID NO: 28486 - DNA, 21 bp, Artificial Sequence
  Description of Artificial Sequence: Synthetic oligonucleotide
tatcgtgggtatcatgtggag

SEQ ID NO: 28487 - DNA, 21 bp, Artificial Sequence
  Description of Artificial Sequence: Synthetic oligonucleotide
tataggcatggttctattgag

SEQ ID NO: 28488 - DNA, 21 bp, Artificial Sequence
  Description of Artificial Sequence: Synthetic oligonucleotide
tataggctgtatgctgatgat

SEQ ID NO: 28489 - DNA, 21 bp, Artificial Sequence
  Description of Artificial Sequence: Synthetic oligonucleotide
tatcggatgggtacggatcag

SEQ ID NO: 28490 - DNA, 21 bp, Artificial Sequence
  Description of Artificial Sequence: Synthetic oligonucleotide
tatcgtcctggtgcgtcggct

SEQ ID NO: 28491 - DNA, 21 bp, Artificial Sequence
  Description of Artificial Sequence: Synthetic oligonucleotide
tatcgtccgctttctactcct

SEQ ID NO: 28492 - DNA, 21 bp, Artificial Sequence
  Description of Artificial Sequence: Synthetic oligonucleotide
tatcggcctcaggagaatgat

SEQ ID NO: 28493 - DNA, 21 bp, Artificial Sequence
  Description of Artificial Sequence: Synthetic oligonucleotide
tataggcaggctttggatcat

SEQ ID NO: 28494 - DNA, 21 bp, Artificial Sequence
  Description of Artificial Sequence: Synthetic oligonucleotide
tatcgtcagctggattttccg

SEQ ID NO: 28495 - DNA, 21 bp, Artificial Sequence
  Description of Artificial Sequence: Synthetic oligonucleotide
tatcgtcagacgcgtgatccg

SEQ ID NO: 28496 - DNA, 21 bp, Artificial Sequence
  Description of Artificial Sequence: Synthetic oligonucleotide
tatcgtcaggttactgaggtg

SEQ ID NO: 28497 - DNA, 21 bp, Artificial Sequence
  Description of Artificial Sequence: Synthetic oligonucleotide
tatcggtctgatacgttgcgt

SEQ ID NO: 28498 - DNA, 21 bp, Artificial Sequence
  Description of Artificial Sequence: Synthetic oligonucleotide
tatcgttctcatactccgcct

SEQ ID NO: 28499 - DNA, 21 bp, Artificial Sequence
  Description of Artificial Sequence: Synthetic oligonucleotide
tatcggagtattgttcctgat

SEQ ID NO: 28500 - DNA, 21 bp, Artificial Sequence
  Description of Artificial Sequence: Synthetic oligonucleotide
tatcggtctccggatgagatg

SEQ ID NO: 28501 - DNA, 21 bp, Artificial Sequence
  Description of Artificial Sequence: Synthetic oligonucleotide
tatcggagttcgacgccggat

SEQ ID NO: 28502 - DNA, 21 bp, Artificial Sequence
  Description of Artificial Sequence: Synthetic oligonucleotide
tatcgttcggttgttcagagt

SEQ ID NO: 28503 - DNA, 21 bp, Artificial Sequence
  Description of Artificial Sequence: Synthetic oligonucleotide
tatcgtacggcgactcctcct

SEQ ID NO: 28504 - DNA, 21 bp, Artificial Sequence
  Description of Artificial Sequence: Synthetic oligonucleotide
tatcggacggagcagctgggt

SEQ ID NO: 28505 - DNA, 21 bp, Artificial Sequence
  Description of Artificial Sequence: Synthetic oligonucleotide
tatcgtacgattgattctggg

SEQ ID NO: 28506 - DNA, 21 bp, Artificial Sequence
  Description of Artificial Sequence: Synthetic oligonucleotide
tataggactttggataatccg

SEQ ID NO: 28507 - DNA, 21 bp, Artificial Sequence
  Description of Artificial Sequence: Synthetic oligonucleotide
tatcggacgccggcgtcttcg

SEQ ID NO: 28508 - DNA, 21 bp, Artificial Sequence
  Description of Artificial Sequence: Synthetic oligonucleotide
tatcgtacgcagccgactcag

SEQ ID NO: 28509 - DNA, 21 bp, Artificial Sequence
  Description of Artificial Sequence: Synthetic oligonucleotide
tatagggttgatagtgctaat

SEQ ID NO: 28510 - DNA, 21 bp, Artificial Sequence
  Description of Artificial Sequence: Synthetic oligonucleotide
tatcgtgtgtcgatgttgtct

SEQ ID NO: 28511 - DNA, 21 bp, Artificial Sequence
  Description of Artificial Sequence: Synthetic oligonucleotide
tatcgtgtgtcgatgtcgagt

SEQ ID NO: 28512 - DNA, 21 bp, Artificial Sequence
  Description of Artificial Sequence: Synthetic oligonucleotide
tatcgggtggttgttgggccg

SEQ ID NO: 28513 - DNA, 21 bp, Artificial Sequence
  Description of Artificial Sequence: Synthetic oligonucleotide
tattctgcgcattctgctcgt

SEQ ID NO: 28514 - DNA, 21 bp, Artificial Sequence
  Description of Artificial Sequence: Synthetic oligonucleotide
tatagtgcttcttcgtatctt

SEQ ID NO: 28515 - DNA, 21 bp, Artificial Sequence
  Description of Artificial Sequence: Synthetic oligonucleotide
tattctgatccggcgcggcct

SEQ ID NO: 28516 - DNA, 21 bp, Artificial Sequence
  Description of Artificial Sequence: Synthetic oligonucleotide
tatagtgattctccgaagcag

SEQ ID NO: 28517 - DNA, 21 bp, Artificial Sequence
  Description of Artificial Sequence: Synthetic oligonucleotide
tattcggatacggattcttct

SEQ ID NO: 28518 - DNA, 21 bp, Artificial Sequence
  Description of Artificial Sequence: Synthetic oligonucleotide
tatagtgattatggtcgtccg

SEQ ID NO: 28519 - DNA, 21 bp, Artificial Sequence
  Description of Artificial Sequence: Synthetic oligonucleotide
tatagtgaggcgaatattcgg

SEQ ID NO: 28520 - DNA, 21 bp, Artificial Sequence
  Description of Artificial Sequence: Synthetic oligonucleotide
tattctgagtttacgctgaat

SEQ ID NO: 28521 - DNA, 21 bp, Artificial Sequence
  Description of Artificial Sequence: Synthetic oligonucleotide
tattcttttcctactagtgct

SEQ ID NO: 28522 - DNA, 21 bp, Artificial Sequence
  Description of Artificial Sequence: Synthetic oligonucleotide
tatagtgggcatgatacttcg

SEQ ID NO: 28523 - DNA, 21 bp, Artificial Sequence
  Description of Artificial Sequence: Synthetic oligonucleotide
tattcggggcgtattggtcct

SEQ ID NO: 28524 - DNA, 21 bp, Artificial Sequence
  Description of Artificial Sequence: Synthetic oligonucleotide
tattctgggcggcctgcgagt

SEQ ID NO: 28525 - DNA, 21 bp, Artificial Sequence
  Description of Artificial Sequence: Synthetic oligonucleotide
tattcgggtagtagtaggaat

SEQ ID NO: 28526 - DNA, 21 bp, Artificial Sequence
  Description of Artificial Sequence: Synthetic oligonucleotide
tattctgggactggttttgcg

SEQ ID NO: 28527 - DNA, 21 bp, Artificial Sequence
  Description of Artificial Sequence: Synthetic oligonucleotide
tattctcatgcgaatctgcct

SEQ ID NO: 28528 - DNA, 21 bp, Artificial Sequence
  Description of Artificial Sequence: Synthetic oligonucleotide
tattctcatgaggctgtgatg

SEQ ID NO: 28529 - DNA, 21 bp, Artificial Sequence
  Description of Artificial Sequence: Synthetic oligonucleotide
tattcgcatattgaggggtct

SEQ ID NO: 28530 - DNA, 21 bp, Artificial Sequence
  Description of Artificial Sequence: Synthetic oligonucleotide
tatagtcatactcagatgtct

SEQ ID NO: 28531 - DNA, 21 bp, Artificial Sequence
  Description of Artificial Sequence: Synthetic oligonucleotide
tattctcatgttacgacttgt

SEQ ID NO: 28532 - DNA, 21 bp, Artificial Sequence
  Description of Artificial Sequence: Synthetic oligonucleotide
tattcgattgctcatcagtcg

SEQ ID NO: 28533 - DNA, 21 bp, Artificial Sequence
  Description of Artificial Sequence: Synthetic oligonucleotide
tatagtcttgcgtattcgcct

SEQ ID NO: 28534 - DNA, 21 bp, Artificial Sequence
  Description of Artificial Sequence: Synthetic oligonucleotide
tatagtcttgaggatgctccg

SEQ ID NO: 28535 - DNA, 21 bp, Artificial Sequence
  Description of Artificial Sequence: Synthetic oligonucleotide
tattcgctggggggtccgtcg

SEQ ID NO: 28536 - DNA, 21 bp, Artificial Sequence
  Description of Artificial Sequence: Synthetic oligonucleotide
tatagtttgccgactgatctt

SEQ ID NO: 28537 - DNA, 21 bp, Artificial Sequence
  Description of Artificial Sequence: Synthetic oligonucleotide
tattcgctgagtcatccttct

SEQ ID NO: 28538 - DNA, 21 bp, Artificial Sequence
  Description of Artificial Sequence: Synthetic oligonucleotide
tattctctgactttgcatgat

SEQ ID NO: 28539 - DNA, 21 bp, Artificial Sequence
  Description of Artificial Sequence: Synthetic oligonucleotide
tattcgatgcatgcggctatt

SEQ ID NO: 28540 - DNA, 21 bp, Artificial Sequence
  Description of Artificial Sequence: Synthetic oligonucleotide
tatagtatgaataagtctcct

SEQ ID NO: 28541 - DNA, 21 bp, Artificial Sequence
  Description of Artificial Sequence: Synthetic oligonucleotide
tatagtatggtgcgtactcct

SEQ ID NO: 28542 - DNA, 21 bp, Artificial Sequence
  Description of Artificial Sequence: Synthetic oligonucleotide
tattctaatgaggcgccgcgt

SEQ ID NO: 28543 - DNA, 21 bp, Artificial Sequence
  Description of Artificial Sequence: Synthetic oligonucleotide
tattctaatgagaagtgggcg

SEQ ID NO: 28544 - DNA, 21 bp, Artificial Sequence
  Description of Artificial Sequence: Synthetic oligonucleotide
tatagtaatcaggctcgtggt

SEQ ID NO: 28545 - DNA, 21 bp, Artificial Sequence
  Description of Artificial Sequence: Synthetic oligonucleotide
tattctccgcattttcgtcct

SEQ ID NO: 28546 - DNA, 21 bp, Artificial Sequence
  Description of Artificial Sequence: Synthetic oligonucleotide
tattctccgattaagactcat

SEQ ID NO: 28547 - DNA, 21 bp, Artificial Sequence
  Description of Artificial Sequence: Synthetic oligonucleotide
tattctccgatttcgggttct

SEQ ID NO: 28548 - DNA, 21 bp, Artificial Sequence
  Description of Artificial Sequence: Synthetic oligonucleotide
tatagtccgttgccttcgcgg

SEQ ID NO: 28549 - DNA, 21 bp, Artificial Sequence
  Description of Artificial Sequence: Synthetic oligonucleotide
tattctccgctgagtcatcat

SEQ ID NO: 28550 - DNA, 21 bp, Artificial Sequence
  Description of Artificial Sequence: Synthetic oligonucleotide
tattctccgaatctgaatggt

SEQ ID NO: 28551 - DNA, 21 bp, Artificial Sequence
  Description of Artificial Sequence: Synthetic oligonucleotide
tattcgccgccgccgtctatg

SEQ ID NO: 28552 - DNA, 21 bp, Artificial Sequence
  Description of Artificial Sequence: Synthetic oligonucleotide
tatagtccgaggacgcctact

SEQ ID NO: 28553 - DNA, 21 bp, Artificial Sequence
  Description of Artificial Sequence: Synthetic oligonucleotide
tattctccgaggacgtctttg

SEQ ID NO: 28554 - DNA, 21 bp, Artificial Sequence
  Description of Artificial Sequence: Synthetic oligonucleotide
tattcgcctacggaggctttt

SEQ ID NO: 28555 - DNA, 21 bp, Artificial Sequence
  Description of Artificial Sequence: Synthetic oligonucleotide
tatagtcctactaggtcgtcg

SEQ ID NO: 28556 - DNA, 21 bp, Artificial Sequence
  Description of Artificial Sequence: Synthetic oligonucleotide
tatagtcagcgtggtgcggat

SEQ ID NO: 28557 - DNA, 21 bp, Artificial Sequence
  Description of Artificial Sequence: Synthetic oligonucleotide
tattcgcagcggaatgattcg

SEQ ID NO: 28558 - DNA, 21 bp, Artificial Sequence
  Description of Artificial Sequence: Synthetic oligonucleotide
tattctaggccttctccgctt

SEQ ID NO: 28559 - DNA, 21 bp, Artificial Sequence
  Description of Artificial Sequence: Synthetic oligonucleotide
tattcgtctggtgggctgcgg

SEQ ID NO: 28560 - DNA, 21 bp, Artificial Sequence
  Description of Artificial Sequence: Synthetic oligonucleotide
tattcgtctcatttgaggaat

SEQ ID NO: 28561 - DNA, 21 bp, Artificial Sequence
  Description of Artificial Sequence: Synthetic oligonucleotide
tatagttctcattctagttct

SEQ ID NO: 28562 - DNA, 21 bp, Artificial Sequence
  Description of Artificial Sequence: Synthetic oligonucleotide
tattcgagtcttgctgcgctg

SEQ ID NO: 28563 - DNA, 21 bp, Artificial Sequence
  Description of Artificial Sequence: Synthetic oligonucleotide
tattcttctaatttggcgcgg

SEQ ID NO: 28564 - DNA, 21 bp, Artificial Sequence
  Description of Artificial Sequence: Synthetic oligonucleotide
tattcgagtccggattggtct

SEQ ID NO: 28565 - DNA, 21 bp, Artificial Sequence
  Description of Artificial Sequence: Synthetic oligonucleotide
tatagttcgccgccgattacg

SEQ ID NO: 28566 - DNA, 21 bp, Artificial Sequence
  Description of Artificial Sequence: Synthetic oligonucleotide
tattcgtctcagttgtcggag

SEQ ID NO: 28567 - DNA, 21 bp, Artificial Sequence
  Description of Artificial Sequence: Synthetic oligonucleotide
tattcgtctcgtggtgaggcg

SEQ ID NO: 28568 - DNA, 21 bp, Artificial Sequence
  Description of Artificial Sequence: Synthetic oligonucleotide
tattcgtcttcggtgttggcg

SEQ ID NO: 28569 - DNA, 21 bp, Artificial Sequence
  Description of Artificial Sequence: Synthetic oligonucleotide
tatagtacggataggtattcg

SEQ ID NO: 28570 - DNA, 21 bp, Artificial Sequence
  Description of Artificial Sequence: Synthetic oligonucleotide
tatagtacgtttcagcctgag

SEQ ID NO: 28571 - DNA, 21 bp, Artificial Sequence
  Description of Artificial Sequence: Synthetic oligonucleotide
tatagtacgatgcgtagtatg

SEQ ID NO: 28572 - DNA, 21 bp, Artificial Sequence
  Description of Artificial Sequence: Synthetic oligonucleotide
tattctactcagtctctgaat

SEQ ID NO: 28573 - DNA, 21 bp, Artificial Sequence
  Description of Artificial Sequence: Synthetic oligonucleotide
tatagtactcgttcgcttagt

SEQ ID NO: 28574 - DNA, 21 bp, Artificial Sequence
  Description of Artificial Sequence: Synthetic oligonucleotide
tattcgactactggtcggctg

SEQ ID NO: 28575 - DNA, 21 bp, Artificial Sequence
  Description of Artificial Sequence: Synthetic oligonucleotide
tattcgactacggttcatgct

SEQ ID NO: 28576 - DNA, 21 bp, Artificial Sequence
  Description of Artificial Sequence: Synthetic oligonucleotide
tattcgacggttggtagtagt

SEQ ID NO: 28577 - DNA, 21 bp, Artificial Sequence
  Description of Artificial Sequence: Synthetic oligonucleotide
tatagtgttgatgctgtttgg

SEQ ID NO: 28578 - DNA, 21 bp, Artificial Sequence
  Description of Artificial Sequence: Synthetic oligonucleotide
tattctgttcgtacgatgtct

SEQ ID NO: 28579 - DNA, 21 bp, Artificial Sequence
  Description of Artificial Sequence: Synthetic oligonucleotide
tattcggttgtgacggttgat

SEQ ID NO: 28580 - DNA, 21 bp, Artificial Sequence
  Description of Artificial Sequence: Synthetic oligonucleotide
tattcttataattcggatcat

SEQ ID NO: 28581 - DNA, 21 bp, Artificial Sequence
  Description of Artificial Sequence: Synthetic oligonucleotide
tatactgcgggggtgtcggcg

SEQ ID NO: 28582 - DNA, 21 bp, Artificial Sequence
  Description of Artificial Sequence: Synthetic oligonucleotide
tatacggcgcgtgctcagagt

SEQ ID NO: 28583 - DNA, 21 bp, Artificial Sequence
  Description of Artificial Sequence: Synthetic oligonucleotide
tatactgctagtggggatatt

SEQ ID NO: 28584 - DNA, 21 bp, Artificial Sequence
  Description of Artificial Sequence: Synthetic oligonucleotide
tatacggagtttgcggctaat

SEQ ID NO: 28585 - DNA, 21 bp, Artificial Sequence
  Description of Artificial Sequence: Synthetic oligonucleotide
tatactggttttacgcttgat

SEQ ID NO: 28586 - DNA, 21 bp, Artificial Sequence
  Description of Artificial Sequence: Synthetic oligonucleotide
tatactggtgggcagctgcat

SEQ ID NO: 28587 - DNA, 21 bp, Artificial Sequence
  Description of Artificial Sequence: Synthetic oligonucleotide
tatacggggttggagccgtct

SEQ ID NO: 28588 - DNA, 21 bp, Artificial Sequence
  Description of Artificial Sequence: Synthetic oligonucleotide
tatacggggtcttctgttctg

SEQ ID NO: 28589 - DNA, 21 bp, Artificial Sequence
  Description of Artificial Sequence: Synthetic oligonucleotide
tatacgcatttgactactgct

SEQ ID NO: 28590 - DNA, 21 bp, Artificial Sequence
  Description of Artificial Sequence: Synthetic oligonucleotide
tatactcatagtattgttact

SEQ ID NO: 28591 - DNA, 21 bp, Artificial Sequence
  Description of Artificial Sequence: Synthetic oligonucleotide
tatactcatgtgctgactccg

SEQ ID NO: 28592 - DNA, 21 bp, Artificial Sequence
  Description of Artificial Sequence: Synthetic oligonucleotide
tatactaagatgctggggcct

SEQ ID NO: 28593 - DNA, 21 bp, Artificial Sequence
  Description of Artificial Sequence: Synthetic oligonucleotide
tatacgaagaatagtacggtt

SEQ ID NO: 28594 - DNA, 21 bp, Artificial Sequence
  Description of Artificial Sequence: Synthetic oligonucleotide
tatacgttggatcagttgtcg

SEQ ID NO: 28595 - DNA, 21 bp, Artificial Sequence
  Description of Artificial Sequence: Synthetic oligonucleotide
tatactctgtctgcgacgacg

SEQ ID NO: 28596 - DNA, 21 bp, Artificial Sequence
  Description of Artificial Sequence: Synthetic oligonucleotide
tatacgatgtcgcctcgtccg

SEQ ID NO: 28597 - DNA, 21 bp, Artificial Sequence
  Description of Artificial Sequence: Synthetic oligonucleotide
tatactaatgatcgtaggtct

SEQ ID NO: 28598 - DNA, 21 bp, Artificial Sequence
  Description of Artificial Sequence: Synthetic oligonucleotide
tatacgaataattttgttgcg

SEQ ID NO: 28599 - DNA, 21 bp, Artificial Sequence
  Description of Artificial Sequence: Synthetic oligonucleotide
tatactcctgctgggcttagt

SEQ ID NO: 28600 - DNA, 21 bp, Artificial Sequence
  Description of Artificial Sequence: Synthetic oligonucleotide
tatacgcctcataggatgtct

SEQ ID NO: 28601 - DNA, 21 bp, Artificial Sequence
  Description of Artificial Sequence: Synthetic oligonucleotide
tatacgcctctgatgtcttcg

SEQ ID NO: 28602 - DNA, 21 bp, Artificial Sequence
  Description of Artificial Sequence: Synthetic oligonucleotide
tatactcagtcgaagactgag

SEQ ID NO: 28603 - DNA, 21 bp, Artificial Sequence
  Description of Artificial Sequence: Synthetic oligonucleotide
tatacgcagacgacgtggaag

SEQ ID NO: 28604 - DNA, 21 bp, Artificial Sequence
  Description of Artificial Sequence: Synthetic oligonucleotide
tatactcgtgcgccggatggt

SEQ ID NO: 28605 - DNA, 21 bp, Artificial Sequence
  Description of Artificial Sequence: Synthetic oligonucleotide
tatacgtcgcatccgacttgt

SEQ ID NO: 28606 - DNA, 21 bp, Artificial Sequence
  Description of Artificial Sequence: Synthetic oligonucleotide
tatacgtcgattagtaatatg

SEQ ID NO: 28607 - DNA, 21 bp, Artificial Sequence
  Description of Artificial Sequence: Synthetic oligonucleotide
tatacgtcgctttctatggcg

SEQ ID NO: 28608 - DNA, 21 bp, Artificial Sequence
  Description of Artificial Sequence: Synthetic oligonucleotide
tatacgtctatgcatgtttct

SEQ ID NO: 28609 - DNA, 21 bp, Artificial Sequence
  Description of Artificial Sequence: Synthetic oligonucleotide
tatacgtctaatattgatatg

SEQ ID NO: 28610 - DNA, 21 bp, Artificial Sequence
  Description of Artificial Sequence: Synthetic oligonucleotide
tatacgtcgccggctcatgtg

SEQ ID NO: 28611 - DNA, 21 bp, Artificial Sequence
  Description of Artificial Sequence: Synthetic oligonucleotide
tatacgtcgaggcatattgct

SEQ ID NO: 28612 - DNA, 21 bp, Artificial Sequence
  Description of Artificial Sequence: Synthetic oligonucleotide
tatacttctcgtgtgctttct

SEQ ID NO: 28613 - DNA, 21 bp, Artificial Sequence
  Description of Artificial Sequence: Synthetic oligonucleotide
tatacttcggtttatgctcat

SEQ ID NO: 28614 - DNA, 21 bp, Artificial Sequence
  Description of Artificial Sequence: Synthetic oligonucleotide
tatactagttatactgctcct

SEQ ID NO: 28615 - DNA, 21 bp, Artificial Sequence
  Description of Artificial Sequence: Synthetic oligonucleotide
tatactacgctgcctgcgcgt

SEQ ID NO: 28616 - DNA, 21 bp, Artificial Sequence
  Description of Artificial Sequence: Synthetic oligonucleotide
tatacgacgaatcgtcagtct

SEQ ID NO: 28617 - DNA, 21 bp, Artificial Sequence
  Description of Artificial Sequence: Synthetic oligonucleotide
tatactacttctccggctctt

SEQ ID NO: 28618 - DNA, 21 bp, Artificial Sequence
  Description of Artificial Sequence: Synthetic oligonucleotide
tatactactagtcctattaag

SEQ ID NO: 28619 - DNA, 21 bp, Artificial Sequence
  Description of Artificial Sequence: Synthetic oligonucleotide
tatactgttcgtcatgttaat

SEQ ID NO: 28620 - DNA, 21 bp, Artificial Sequence
  Description of Artificial Sequence: Synthetic oligonucleotide
tatgttgctactgagcagaag

SEQ ID NO: 28621 - DNA, 21 bp, Artificial Sequence
  Description of Artificial Sequence: Synthetic oligonucleotide
tatgttgatgatcctagtggg

SEQ ID NO: 28622 - DNA, 21 bp, Artificial Sequence
  Description of Artificial Sequence: Synthetic oligonucleotide
tatgttcatcttaatactacg

SEQ ID NO: 28623 - DNA, 21 bp, Artificial Sequence
  Description of Artificial Sequence: Synthetic oligonucleotide
tatgtgaagttgtatgagaag

SEQ ID NO: 28624 - DNA, 21 bp, Artificial Sequence
  Description of Artificial Sequence: Synthetic oligonucleotide
tatgttaagccgaatggtgct

SEQ ID NO: 28625 - DNA, 21 bp, Artificial Sequence
  Description of Artificial Sequence: Synthetic oligonucleotide
tatgttaagtcgcagacggct

SEQ ID NO: 28626 - DNA, 21 bp, Artificial Sequence
  Description of Artificial Sequence: Synthetic oligonucleotide
tatgtgatgtcgcagtctgcg

SEQ ID NO: 28627 - DNA, 21 bp, Artificial Sequence
  Description of Artificial Sequence: Synthetic oligonucleotide
tatgttccgggtcggaatgag

SEQ ID NO: 28628 - DNA, 21 bp, Artificial Sequence
  Description of Artificial Sequence: Synthetic oligonucleotide
tatgtgcctatgacgtctcct

SEQ ID NO: 28629 - DNA, 21 bp, Artificial Sequence
  Description of Artificial Sequence: Synthetic oligonucleotide
tatgttcctacttcgcttggg

SEQ ID NO: 28630 - DNA, 21 bp, Artificial Sequence
  Description of Artificial Sequence: Synthetic oligonucleotide
tatgtgcagcagcatgtgaag

SEQ ID NO: 28631 - DNA, 21 bp, Artificial Sequence
  Description of Artificial Sequence: Synthetic oligonucleotide
tatgttcgggggatggatgct

SEQ ID NO: 28632 - DNA, 21 bp, Artificial Sequence
  Description of Artificial Sequence: Synthetic oligonucleotide
tatgtgcgggtgagtaatgtt

SEQ ID NO: 28633 - DNA, 21 bp, Artificial Sequence
  Description of Artificial Sequence: Synthetic oligonucleotide
tatgtttcgcatgtggatttg

SEQ ID NO: 28634 - DNA, 21 bp, Artificial Sequence
  Description of Artificial Sequence: Synthetic oligonucleotide
tatgtttctatgccgaatggt

SEQ ID NO: 28635 - DNA, 21 bp, Artificial Sequence
  Description of Artificial Sequence: Synthetic oligonucleotide
tatgttacggatcggatgccg

SEQ ID NO: 28636 - DNA, 21 bp, Artificial Sequence
  Description of Artificial Sequence: Synthetic oligonucleotide
tatgtgactggtcatcatgat

SEQ ID NO: 28637 - DNA, 21 bp, Artificial Sequence
  Description of Artificial Sequence: Synthetic oligonucleotide
tatgttactaaggcgccgctt

SEQ ID NO: 28638 - DNA, 21 bp, Artificial Sequence
  Description of Artificial Sequence: Synthetic oligonucleotide
tatgtgacgcagattcatggg

SEQ ID NO: 28639 - DNA, 21 bp, Artificial Sequence
  Description of Artificial Sequence: Synthetic oligonucleotide
tatgttgtggagccggagccg

SEQ ID NO: 28640 - DNA, 21 bp, Artificial Sequence
  Description of Artificial Sequence: Synthetic oligonucleotide
tatgttgttaatctgccgcgt

SEQ ID NO: 28641 - DNA, 21 bp, Artificial Sequence
  Description of Artificial Sequence: Synthetic oligonucleotide
tatgttgttcgggcggatggg

SEQ ID NO: 28642 - DNA, 21 bp, Artificial Sequence
  Description of Artificial Sequence: Synthetic oligonucleotide
tattatgatcgtagtattggg

SEQ ID NO: 28643 - DNA, 21 bp, Artificial Sequence
  Description of Artificial Sequence: Synthetic oligonucleotide
tattatgagtcgtcgaagcag

SEQ ID NO: 28644 - DNA, 21 bp, Artificial Sequence
  Description of Artificial Sequence: Synthetic oligonucleotide
tattatgggagtgcgcctgct

SEQ ID NO: 28645 - DNA, 21 bp, Artificial Sequence
  Description of Artificial Sequence: Synthetic oligonucleotide
tattatggggtgcatcctaat

SEQ ID NO: 28646 - DNA, 21 bp, Artificial Sequence
  Description of Artificial Sequence: Synthetic oligonucleotide
tattataatccgagtacttct

SEQ ID NO: 28647 - DNA, 21 bp, Artificial Sequence
  Description of Artificial Sequence: Synthetic oligonucleotide
tattatccgcgtcctggtggg

SEQ ID NO: 28648 - DNA, 21 bp, Artificial Sequence
  Description of Artificial Sequence: Synthetic oligonucleotide
tattatagtgctatggctgat

SEQ ID NO: 28649 - DNA, 21 bp, Artificial Sequence
  Description of Artificial Sequence: Synthetic oligonucleotide
tattatagtaatacggttact

SEQ ID NO: 28650 - DNA, 21 bp, Artificial Sequence
  Description of Artificial Sequence: Synthetic oligonucleotide
gcagcagcagcaagcaacaca

SEQ ID NO: 28651 - DNA, 21 bp, Artificial Sequence
  Description of Artificial Sequence: Synthetic oligonucleotide
gcagcagcaatcgacggagac

SEQ ID NO: 28652 - DNA, 21 bp, Artificial Sequence
  Description of Artificial Sequence: Synthetic oligonucleotide
gcagcagcactcagcacaaaa

SEQ ID NO: 28653 - DNA, 21 bp, Artificial Sequence
  Description of Artificial Sequence: Synthetic oligonucleotide
gcagcagacgcaaacgtcaac

SEQ ID NO: 28654 - DNA, 21 bp, Artificial Sequence
  Description of Artificial Sequence: Synthetic oligonucleotide
gcagcagacttcaaaagagac

SEQ ID NO: 28655 - DNA, 21 bp, Artificial Sequence
  Description of Artificial Sequence: Synthetic oligonucleotide
gcagcagacaaaacaagcaga

SEQ ID NO: 28656 - DNA, 21 bp, Artificial Sequence
  Description of Artificial Sequence: Synthetic oligonucleotide
gcagcagacccaggaagcaga

SEQ ID NO: 28657 - DNA, 21 bp, Artificial Sequence
  Description of Artificial Sequence: Synthetic oligonucleotide
gcagcagacagagtcagacca

SEQ ID NO: 28658 - DNA, 21 bp, Artificial Sequence
  Description of Artificial Sequence: Synthetic oligonucleotide
gcagcattcatggtcgaaaga

SEQ ID NO: 28659 - DNA, 21 bp, Artificial Sequence
  Description of Artificial Sequence: Synthetic oligonucleotide
gcagcaggattcgcaacagac

SEQ ID NO: 28660 - DNA, 21 bp, Artificial Sequence
  Description of Artificial Sequence: Synthetic oligonucleotide
gcagcaggattccacctcagc

SEQ ID NO: 28661 - DNA, 21 bp, Artificial Sequence
  Description of Artificial Sequence: Synthetic oligonucleotide
gcagcaggaatgatcgcaagc

SEQ ID NO: 28662 - DNA, 21 bp, Artificial Sequence
  Description of Artificial Sequence: Synthetic oligonucleotide
gcagcaggaagcacacacatc

SEQ ID NO: 28663 - DNA, 21 bp, Artificial Sequence
  Description of Artificial Sequence: Synthetic oligonucleotide
gcagcacacgcaaacacagtc

SEQ ID NO: 28664 - DNA, 21 bp, Artificial Sequence
  Description of Artificial Sequence: Synthetic oligonucleotide
gcagcacacccacaactcttc

SEQ ID NO: 28665 - DNA, 21 bp, Artificial Sequence
  Description of Artificial Sequence: Synthetic oligonucleotide
gcagcacacagaacagcacac

SEQ ID NO: 28666 - DNA, 21 bp, Artificial Sequence
  Description of Artificial Sequence: Synthetic oligonucleotide
gcagcaatcggaaaagacgaa

SEQ ID NO: 28667 - DNA, 21 bp, Artificial Sequence
  Description of Artificial Sequence: Synthetic oligonucleotide
gcagcaatcagaagcagctac

SEQ ID NO: 28668 - DNA, 21 bp, Artificial Sequence
  Description of Artificial Sequence: Synthetic oligonucleotide
gcagcaaaaacaagccaactc

SEQ ID NO: 28669 - DNA, 21 bp, Artificial Sequence
  Description of Artificial Sequence: Synthetic oligonucleotide
gcagcactcccaacactcctc

SEQ ID NO: 28670 - DNA, 21 bp, Artificial Sequence
  Description of Artificial Sequence: Synthetic oligonucleotide
gcagcactcagccacctccac

SEQ ID NO: 28671 - DNA, 21 bp, Artificial Sequence
  Description of Artificial Sequence: Synthetic oligonucleotide
gcagcactcagcagagtcgac

SEQ ID NO: 28672 - DNA, 21 bp, Artificial Sequence
  Description of Artificial Sequence: Synthetic oligonucleotide
gcagcactcacaaaagtcctc

SEQ ID NO: 28673 - DNA, 21 bp, Artificial Sequence
  Description of Artificial Sequence: Synthetic oligonucleotide
gcagcactcacaagactcaca

SEQ ID NO: 28674 - DNA, 21 bp, Artificial Sequence
  Description of Artificial Sequence: Synthetic oligonucleotide
gcagcaatgatcaaaagacaa

SEQ ID NO: 28675 - DNA, 21 bp, Artificial Sequence
  Description of Artificial Sequence: Synthetic oligonucleotide
gcagcaatgatgaaaacagtc

SEQ ID NO: 28676 - DNA, 21 bp, Artificial Sequence
  Description of Artificial Sequence: Synthetic oligonucleotide
gcagcaatggtcagcacacca

SEQ ID NO: 28677 - DNA, 21 bp, Artificial Sequence
  Description of Artificial Sequence: Synthetic oligonucleotide
gcagcaaacctcagaacagga

SEQ ID NO: 28678 - DNA, 21 bp, Artificial Sequence
  Description of Artificial Sequence: Synthetic oligonucleotide
gcagcaaacctcgtcctccaa

SEQ ID NO: 28679 - DNA, 21 bp, Artificial Sequence
  Description of Artificial Sequence: Synthetic oligonucleotide
gcagcaaacagcacacaaagc

SEQ ID NO: 28680 - DNA, 21 bp, Artificial Sequence
  Description of Artificial Sequence: Synthetic oligonucleotide
gcagcaccaatcgcagcagca

SEQ ID NO: 28681 - DNA, 21 bp, Artificial Sequence
  Description of Artificial Sequence: Synthetic oligonucleotide
gcagcaccaccattcggacac

SEQ ID NO: 28682 - DNA, 21 bp, Artificial Sequence
  Description of Artificial Sequence: Synthetic oligonucleotide
gcagcaccaagcagcagcatc

SEQ ID NO: 28683 - DNA, 21 bp, Artificial Sequence
  Description of Artificial Sequence: Synthetic oligonucleotide
gcagcaccaagctacagagga

SEQ ID NO: 28684 - DNA, 21 bp, Artificial Sequence
  Description of Artificial Sequence: Synthetic oligonucleotide
gcagcaccaacaatcacacca

SEQ ID NO: 28685 - DNA, 21 bp, Artificial Sequence
  Description of Artificial Sequence: Synthetic oligonucleotide
gcagcacaactcggagaaaga

SEQ ID NO: 28686 - DNA, 21 bp, Artificial Sequence
  Description of Artificial Sequence: Synthetic oligonucleotide
gcagcacaaccatacacacac

SEQ ID NO: 28687 - DNA, 21 bp, Artificial Sequence
  Description of Artificial Sequence: Synthetic oligonucleotide
gcagcaagaccaccaaacgca

SEQ ID NO: 28688 - DNA, 21 bp, Artificial Sequence
  Description of Artificial Sequence: Synthetic oligonucleotide
gcagcaagaagcacagtcgtc

SEQ ID NO: 28689 - DNA, 21 bp, Artificial Sequence
  Description of Artificial Sequence: Synthetic oligonucleotide
gcagcaagaacaagcttcaac

SEQ ID NO: 28690 - DNA, 21 bp, Artificial Sequence
  Description of Artificial Sequence: Synthetic oligonucleotide
gcagcaagaacaacatacaca

SEQ ID NO: 28691 - DNA, 21 bp, Artificial Sequence
  Description of Artificial Sequence: Synthetic oligonucleotide
gcagcaagcgcaagcagatac

SEQ ID NO: 28692 - DNA, 21 bp, Artificial Sequence
  Description of Artificial Sequence: Synthetic oligonucleotide
gcagcaagcagcgacagctac

SEQ ID NO: 28693 - DNA, 21 bp, Artificial Sequence
  Description of Artificial Sequence: Synthetic oligonucleotide
gcagcaagctacgtcggaatc

SEQ ID NO: 28694 - DNA, 21 bp, Artificial Sequence
  Description of Artificial Sequence: Synthetic oligonucleotide
gcagcaacatgcggacaaaac

SEQ ID NO: 28695 - DNA, 21 bp, Artificial Sequence
  Description of Artificial Sequence: Synthetic oligonucleotide
gcagcaacactcgcaacagca

SEQ ID NO: 28696 - DNA, 21 bp, Artificial Sequence
  Description of Artificial Sequence: Synthetic oligonucleotide
gcagcaacaccaagcaaacac

SEQ ID NO: 28697 - DNA, 21 bp, Artificial Sequence
  Description of Artificial Sequence: Synthetic oligonucleotide
gcagcaacaagcctcaacagc

SEQ ID NO: 28698 - DNA, 21 bp, Artificial Sequence
  Description of Artificial Sequence: Synthetic oligonucleotide
gcagcagtcggagcaagcagc

SEQ ID NO: 28699 - DNA, 21 bp, Artificial Sequence
  Description of Artificial Sequence: Synthetic oligonucleotide
gcagcagtcggaggactcgga

SEQ ID NO: 28700 - DNA, 21 bp, Artificial Sequence
  Description of Artificial Sequence: Synthetic oligonucleotide
gcagcatgggcagacgaaagc

SEQ ID NO: 28701 - DNA, 21 bp, Artificial Sequence
  Description of Artificial Sequence: Synthetic oligonucleotide
gcagcatacagcttcagccca

SEQ ID NO: 28702 - DNA, 21 bp, Artificial Sequence
  Description of Artificial Sequence: Synthetic oligonucleotide
gcagacgcacacatgaacaga

SEQ ID NO: 28703 - DNA, 21 bp, Artificial Sequence
  Description of Artificial Sequence: Synthetic oligonucleotide
gcagacgaccaccacagccac

SEQ ID NO: 28704 - DNA, 21 bp, Artificial Sequence
  Description of Artificial Sequence: Synthetic oligonucleotide
gcagacgaagaagacagctgc

SEQ ID NO: 28705 - DNA, 21 bp, Artificial Sequence
  Description of Artificial Sequence: Synthetic oligonucleotide
gcagacggagacgtcccaaga

SEQ ID NO: 28706 - DNA, 21 bp, Artificial Sequence
  Description of Artificial Sequence: Synthetic oligonucleotide
gcagacggaaaaagcagcgac

SEQ ID NO: 28707 - DNA, 21 bp, Artificial Sequence
  Description of Artificial Sequence: Synthetic oligonucleotide
gcagacggaagcacaacactc

SEQ ID NO: 28708 - DNA, 21 bp, Artificial Sequence
  Description of Artificial Sequence: Synthetic oligonucleotide
gcagaccacgtcccatacatc

SEQ ID NO: 28709 - DNA, 21 bp, Artificial Sequence
  Description of Artificial Sequence: Synthetic oligonucleotide
gcagacaaactcggacacaca

SEQ ID NO: 28710 - DNA, 21 bp, Artificial Sequence
  Description of Artificial Sequence: Synthetic oligonucleotide
gcagacaaaccaagcgacaga

SEQ ID NO: 28711 - DNA, 21 bp, Artificial Sequence
  Description of Artificial Sequence: Synthetic oligonucleotide
gcagacaaaagcagagtcgga

SEQ ID NO: 28712 - DNA, 21 bp, Artificial Sequence
  Description of Artificial Sequence: Synthetic oligonucleotide
gcagacaaagtcagactcgtc

SEQ ID NO: 28713 - DNA, 21 bp, Artificial Sequence
  Description of Artificial Sequence: Synthetic oligonucleotide
gcagacctcgcaatcagcgtc

SEQ ID NO: 28714 - DNA, 21 bp, Artificial Sequence
  Description of Artificial Sequence: Synthetic oligonucleotide
gcagacctcctcccaagcaca

SEQ ID NO: 28715 - DNA, 21 bp, Artificial Sequence
  Description of Artificial Sequence: Synthetic oligonucleotide
gcagacctcagcccaacagaa

SEQ ID NO: 28716 - DNA, 21 bp, Artificial Sequence
  Description of Artificial Sequence: Synthetic oligonucleotide
gcagacctctacacaagacca

SEQ ID NO: 28717 - DNA, 21 bp, Artificial Sequence
  Description of Artificial Sequence: Synthetic oligonucleotide
gcagacatgagaagcagcgca

SEQ ID NO: 28718 - DNA, 21 bp, Artificial Sequence
  Description of Artificial Sequence: Synthetic oligonucleotide
gcagacaaccaagtcccactc

SEQ ID NO: 28719 - DNA, 21 bp, Artificial Sequence
  Description of Artificial Sequence: Synthetic oligonucleotide
gcagacccagaaggagcaagc

SEQ ID NO: 28720 - DNA, 21 bp, Artificial Sequence
  Description of Artificial Sequence: Synthetic oligonucleotide
gcagacccagaaagagtcaga

SEQ ID NO: 28721 - DNA, 21 bp, Artificial Sequence
  Description of Artificial Sequence: Synthetic oligonucleotide
gcagacccacacatgccaaaa

SEQ ID NO: 28722 - DNA, 21 bp, Artificial Sequence
  Description of Artificial Sequence: Synthetic oligonucleotide
gcagacccacacagaaaccaa

SEQ ID NO: 28723 - DNA, 21 bp, Artificial Sequence
  Description of Artificial Sequence: Synthetic oligonucleotide
gcagacccaatgcacagagca

SEQ ID NO: 28724 - DNA, 21 bp, Artificial Sequence
  Description of Artificial Sequence: Synthetic oligonucleotide
gcagacccaccaaaattctgg

SEQ ID NO: 28725 - DNA, 21 bp, Artificial Sequence
  Description of Artificial Sequence: Synthetic oligonucleotide
gcagacccaagacaaaaaagc

SEQ ID NO: 28726 - DNA, 21 bp, Artificial Sequence
  Description of Artificial Sequence: Synthetic oligonucleotide
gcagacagagcacacgcagtc

SEQ ID NO: 28727 - DNA, 21 bp, Artificial Sequence
  Description of Artificial Sequence: Synthetic oligonucleotide
gcagacagaggaagccacagc

SEQ ID NO: 28728 - DNA, 21 bp, Artificial Sequence
  Description of Artificial Sequence: Synthetic oligonucleotide
gcagacagactcccattcctc

SEQ ID NO: 28729 - DNA, 21 bp, Artificial Sequence
  Description of Artificial Sequence: Synthetic oligonucleotide
gcagacagaagcccaatcaca

SEQ ID NO: 28730 - DNA, 21 bp, Artificial Sequence
  Description of Artificial Sequence: Synthetic oligonucleotide
gcagacagatacggaagagtc

SEQ ID NO: 28731 - DNA, 21 bp, Artificial Sequence
  Description of Artificial Sequence: Synthetic oligonucleotide
gcagacagcggaagaacaatc

SEQ ID NO: 28732 - DNA, 21 bp, Artificial Sequence
  Description of Artificial Sequence: Synthetic oligonucleotide
gcagacagcacacacgcagca

SEQ ID NO: 28733 - DNA, 21 bp, Artificial Sequence
  Description of Artificial Sequence: Synthetic oligonucleotide
gcagacacaatgacaagcagc

SEQ ID NO: 28734 - DNA, 21 bp, Artificial Sequence
  Description of Artificial Sequence: Synthetic oligonucleotide
gcagacacaatgacaacagtc

SEQ ID NO: 28735 - DNA, 21 bp, Artificial Sequence
  Description of Artificial Sequence: Synthetic oligonucleotide
gcagacacaagactccacagc

SEQ ID NO: 28736 - DNA, 21 bp, Artificial Sequence
  Description of Artificial Sequence: Synthetic oligonucleotide
gcagacacaagactccaaaca

SEQ ID NO: 28737 - DNA, 21 bp, Artificial Sequence
  Description of Artificial Sequence: Synthetic oligonucleotide
gcagacgtcagaacactcagc

SEQ ID NO: 28738 - DNA, 21 bp, Artificial Sequence
  Description of Artificial Sequence: Synthetic oligonucleotide
gcagaagcaggaatgttcgac

SEQ ID NO: 28739 - DNA, 21 bp, Artificial Sequence
  Description of Artificial Sequence: Synthetic oligonucleotide
gcagaagcaaaaaacacaaga

SEQ ID NO: 28740 - DNA, 21 bp, Artificial Sequence
  Description of Artificial Sequence: Synthetic oligonucleotide
gcagaagcaccaacaagagac

SEQ ID NO: 28741 - DNA, 21 bp, Artificial Sequence
  Description of Artificial Sequence: Synthetic oligonucleotide
gcagaagcaacaagcgtcgaa

SEQ ID NO: 28742 - DNA, 21 bp, Artificial Sequence
  Description of Artificial Sequence: Synthetic oligonucleotide
gcagaaggaaacccaaaaatc

SEQ ID NO: 28743 - DNA, 21 bp, Artificial Sequence
  Description of Artificial Sequence: Synthetic oligonucleotide
gcagaaggaccagaatggaga

SEQ ID NO: 28744 - DNA, 21 bp, Artificial Sequence
  Description of Artificial Sequence: Synthetic oligonucleotide
gcagaacacccaaacagcctc

SEQ ID NO: 28745 - DNA, 21 bp, Artificial Sequence
  Description of Artificial Sequence: Synthetic oligonucleotide
gcagaacacagcccaagcctc

SEQ ID NO: 28746 - DNA, 21 bp, Artificial Sequence
  Description of Artificial Sequence: Synthetic oligonucleotide
gcagaaatcgtcagacacgtc

SEQ ID NO: 28747 - DNA, 21 bp, Artificial Sequence
  Description of Artificial Sequence: Synthetic oligonucleotide
gcagaactcgcaagcccaatc

SEQ ID NO: 28748 - DNA, 21 bp, Artificial Sequence
  Description of Artificial Sequence: Synthetic oligonucleotide
gcagaactcaaaagaggacca

SEQ ID NO: 28749 - DNA, 21 bp, Artificial Sequence
  Description of Artificial Sequence: Synthetic oligonucleotide
gcagaactcccaccaagacaa

SEQ ID NO: 28750 - DNA, 21 bp, Artificial Sequence
  Description of Artificial Sequence: Synthetic oligonucleotide
gcagaactccaaccacacctc

SEQ ID NO: 28751 - DNA, 21 bp, Artificial Sequence
  Description of Artificial Sequence: Synthetic oligonucleotide
gcagaaccaagaagctggagc

SEQ ID NO: 28752 - DNA, 21 bp, Artificial Sequence
  Description of Artificial Sequence: Synthetic oligonucleotide
gcagaaccaacagacttcctc

SEQ ID NO: 28753 - DNA, 21 bp, Artificial Sequence
  Description of Artificial Sequence: Synthetic oligonucleotide
gcagaaagagcaacatggagc

SEQ ID NO: 28754 - DNA, 21 bp, Artificial Sequence
  Description of Artificial Sequence: Synthetic oligonucleotide
gcagaaagaaacatggcacca

SEQ ID NO: 28755 - DNA, 21 bp, Artificial Sequence
  Description of Artificial Sequence: Synthetic oligonucleotide
gcagaaagacaacaatacctc

SEQ ID NO: 28756 - DNA, 21 bp, Artificial Sequence
  Description of Artificial Sequence: Synthetic oligonucleotide
gcagaaagcgcatacgtccca

SEQ ID NO: 28757 - DNA, 21 bp, Artificial Sequence
  Description of Artificial Sequence: Synthetic oligonucleotide
gcagaaacaagcagcagcagc

SEQ ID NO: 28758 - DNA, 21 bp, Artificial Sequence
  Description of Artificial Sequence: Synthetic oligonucleotide
gcattcgcaggagtcagagga

SEQ ID NO: 28759 - DNA, 21 bp, Artificial Sequence
  Description of Artificial Sequence: Synthetic oligonucleotide
gcattcgcaagaagcgcacca

SEQ ID NO: 28760 - DNA, 21 bp, Artificial Sequence
  Description of Artificial Sequence: Synthetic oligonucleotide
gcattcgacacaagaggagga

SEQ ID NO: 28761 - DNA, 21 bp, Artificial Sequence
  Description of Artificial Sequence: Synthetic oligonucleotide
gcattcgaaggaagaagccca

SEQ ID NO: 28762 - DNA, 21 bp, Artificial Sequence
  Description of Artificial Sequence: Synthetic oligonucleotide
gcattcgaaagcccaagagca

SEQ ID NO: 28763 - DNA, 21 bp, Artificial Sequence
  Description of Artificial Sequence: Synthetic oligonucleotide
gcattcggagcaagcatgagc

SEQ ID NO: 28764 - DNA, 21 bp, Artificial Sequence
  Description of Artificial Sequence: Synthetic oligonucleotide
gcattcggaaaaggacacaca

SEQ ID NO: 28765 - DNA, 21 bp, Artificial Sequence
  Description of Artificial Sequence: Synthetic oligonucleotide
gcattcggaaaaaacacagtc

SEQ ID NO: 28766 - DNA, 21 bp, Artificial Sequence
  Description of Artificial Sequence: Synthetic oligonucleotide
gcattcggaacactcaaaatg

SEQ ID NO: 28767 - DNA, 21 bp, Artificial Sequence
  Description of Artificial Sequence: Synthetic oligonucleotide
gcattcctcgcagcaaacgca

SEQ ID NO: 28768 - DNA, 21 bp, Artificial Sequence
  Description of Artificial Sequence: Synthetic oligonucleotide
gcattcctcaaccaactcagc

SEQ ID NO: 28769 - DNA, 21 bp, Artificial Sequence
  Description of Artificial Sequence: Synthetic oligonucleotide
gcattcctcagcagcgcacca

SEQ ID NO: 28770 - DNA, 21 bp, Artificial Sequence
  Description of Artificial Sequence: Synthetic oligonucleotide
gcattcatgagcaaactcgaa

SEQ ID NO: 28771 - DNA, 21 bp, Artificial Sequence
  Description of Artificial Sequence: Synthetic oligonucleotide
gcattcaacggaacagacagc

SEQ ID NO: 28772 - DNA, 21 bp, Artificial Sequence
  Description of Artificial Sequence: Synthetic oligonucleotide
gcattcaaccacgaactcagc

SEQ ID NO: 28773 - DNA, 21 bp, Artificial Sequence
  Description of Artificial Sequence: Synthetic oligonucleotide
gcattcaacacaagccacgac

SEQ ID NO: 28774 - DNA, 21 bp, Artificial Sequence
  Description of Artificial Sequence: Synthetic oligonucleotide
gcattcccactcccaccacac

SEQ ID NO: 28775 - DNA, 21 bp, Artificial Sequence
  Description of Artificial Sequence: Synthetic oligonucleotide
gcattcccacaaagcggaaac

SEQ ID NO: 28776 - DNA, 21 bp, Artificial Sequence
  Description of Artificial Sequence: Synthetic oligonucleotide
gcattccaagacaaacaaaca

SEQ ID NO: 28777 - DNA, 21 bp, Artificial Sequence
  Description of Artificial Sequence: Synthetic oligonucleotide
gcattccaacaccaaccacca

SEQ ID NO: 28778 - DNA, 21 bp, Artificial Sequence
  Description of Artificial Sequence: Synthetic oligonucleotide
gcattccaaagcgcaagagca

SEQ ID NO: 28779 - DNA, 21 bp, Artificial Sequence
  Description of Artificial Sequence: Synthetic oligonucleotide
gcattcagcaacgcaggacca

SEQ ID NO: 28780 - DNA, 21 bp, Artificial Sequence
  Description of Artificial Sequence: Synthetic oligonucleotide
gcattcagcacaacagtcatg

SEQ ID NO: 28781 - DNA, 21 bp, Artificial Sequence
  Description of Artificial Sequence: Synthetic oligonucleotide
gcattcacaggaaaaagcagc

SEQ ID NO: 28782 - DNA, 21 bp, Artificial Sequence
  Description of Artificial Sequence: Synthetic oligonucleotide
gcattcgtcgcaagcagccca

SEQ ID NO: 28783 - DNA, 21 bp, Artificial Sequence
  Description of Artificial Sequence: Synthetic oligonucleotide
gcattcgtcggaaaagtcaca

SEQ ID NO: 28784 - DNA, 21 bp, Artificial Sequence
  Description of Artificial Sequence: Synthetic oligonucleotide
gcattcgtcccaaaaagcatg

SEQ ID NO: 28785 - DNA, 21 bp, Artificial Sequence
  Description of Artificial Sequence: Synthetic oligonucleotide
gcaggagcagaagaacacatg

SEQ ID NO: 28786 - DNA, 21 bp, Artificial Sequence
  Description of Artificial Sequence: Synthetic oligonucleotide
gcaggagcactcatgcacctc

SEQ ID NO: 28787 - DNA, 21 bp, Artificial Sequence
  Description of Artificial Sequence: Synthetic oligonucleotide
gcaggagcaccaacaggactc

SEQ ID NO: 28788 - DNA, 21 bp, Artificial Sequence
  Description of Artificial Sequence: Synthetic oligonucleotide
gcaggagcaacaagcttctac

SEQ ID NO: 28789 - DNA, 21 bp, Artificial Sequence
  Description of Artificial Sequence: Synthetic oligonucleotide
gcaggaggagcaggacaaatg

SEQ ID NO: 28790 - DNA, 21 bp, Artificial Sequence
  Description of Artificial Sequence: Synthetic oligonucleotide
gcaggaggacaaccaagcctc

SEQ ID NO: 28791 - DNA, 21 bp, Artificial Sequence
  Description of Artificial Sequence: Synthetic oligonucleotide
gcaggaggaagctggccagca

SEQ ID NO: 28792 - DNA, 21 bp, Artificial Sequence
  Description of Artificial Sequence: Synthetic oligonucleotide
gcaggaggaacaagcatgcca

SEQ ID NO: 28793 - DNA, 21 bp, Artificial Sequence
  Description of Artificial Sequence: Synthetic oligonucleotide
gcaggaggatacctcgtccca

SEQ ID NO: 28794 - DNA, 21 bp, Artificial Sequence
  Description of Artificial Sequence: Synthetic oligonucleotide
gcaggacacagagcagacagc

SEQ ID NO: 28795 - DNA, 21 bp, Artificial Sequence
  Description of Artificial Sequence: Synthetic oligonucleotide
gcaggacacacaaacctccca

SEQ ID NO: 28796 - DNA, 21 bp, Artificial Sequence
  Description of Artificial Sequence: Synthetic oligonucleotide
gcaggacacgtcgtcagcatg

SEQ ID NO: 28797 - DNA, 21 bp, Artificial Sequence
  Description of Artificial Sequence: Synthetic oligonucleotide
gcaggaatcacaacagcagtc

SEQ ID NO: 28798 - DNA, 21 bp, Artificial Sequence
  Description of Artificial Sequence: Synthetic oligonucleotide
gcaggaaaagcaacatacatc

SEQ ID NO: 28799 - DNA, 21 bp, Artificial Sequence
  Description of Artificial Sequence: Synthetic oligonucleotide
gcaggaaaactcgtcagcagc

SEQ ID NO: 28800 - DNA, 21 bp, Artificial Sequence
  Description of Artificial Sequence: Synthetic oligonucleotide
gcaggactcgcagtcaaacca

SEQ ID NO: 28801 - DNA, 21 bp, Artificial Sequence
  Description of Artificial Sequence: Synthetic oligonucleotide
gcaggactcgacttctaccca

SEQ ID NO: 28802 - DNA, 21 bp, Artificial Sequence
  Description of Artificial Sequence: Synthetic oligonucleotide
gcaggactcaaagacgtcaca

SEQ ID NO: 28803 - DNA, 21 bp, Artificial Sequence
  Description of Artificial Sequence: Synthetic oligonucleotide
gcaggactcctcacacaaatc

SEQ ID NO: 28804 - DNA, 21 bp, Artificial Sequence
  Description of Artificial Sequence: Synthetic oligonucleotide
gcaggactcaacggacaagga

SEQ ID NO: 28805 - DNA, 21 bp, Artificial Sequence
  Description of Artificial Sequence: Synthetic oligonucleotide
gcaggactcaaccacagcgtc

SEQ ID NO: 28806 - DNA, 21 bp, Artificial Sequence
  Description of Artificial Sequence: Synthetic oligonucleotide
gcaggactccaacaactcagc

SEQ ID NO: 28807 - DNA, 21 bp, Artificial Sequence
  Description of Artificial Sequence: Synthetic oligonucleotide
gcaggaatggacagcaacgac

SEQ ID NO: 28808 - DNA, 21 bp, Artificial Sequence
  Description of Artificial Sequence: Synthetic oligonucleotide
gcaggaatgcacagcatgaca

SEQ ID NO: 28809 - DNA, 21 bp, Artificial Sequence
  Description of Artificial Sequence: Synthetic oligonucleotide
gcaggaatgccaccagcacca

SEQ ID NO: 28810 - DNA, 21 bp, Artificial Sequence
  Description of Artificial Sequence: Synthetic oligonucleotide
gcaggaaaccacgcagtccaa

SEQ ID NO: 28811 - DNA, 21 bp, Artificial Sequence
  Description of Artificial Sequence: Synthetic oligonucleotide
gcaggaaacagcaaaacaagc

SEQ ID NO: 28812 - DNA, 21 bp, Artificial Sequence
  Description of Artificial Sequence: Synthetic oligonucleotide
gcaggaaacagcctcagcagc

SEQ ID NO: 28813 - DNA, 21 bp, Artificial Sequence
  Description of Artificial Sequence: Synthetic oligonucleotide
gcaggaccacacgtcctcgca

SEQ ID NO: 28814 - DNA, 21 bp, Artificial Sequence
  Description of Artificial Sequence: Synthetic oligonucleotide
gcaggaccaagcaacttcgac

SEQ ID NO: 28815 - DNA, 21 bp, Artificial Sequence
  Description of Artificial Sequence: Synthetic oligonucleotide
gcaggaccaacaaacccattc

SEQ ID NO: 28816 - DNA, 21 bp, Artificial Sequence
  Description of Artificial Sequence: Synthetic oligonucleotide
gcaggacaattcacaaaaagc

SEQ ID NO: 28817 - DNA, 21 bp, Artificial Sequence
  Description of Artificial Sequence: Synthetic oligonucleotide
gcaggacaaggaagccaaagc

SEQ ID NO: 28818 - DNA, 21 bp, Artificial Sequence
  Description of Artificial Sequence: Synthetic oligonucleotide
gcaggacaaaacagcctcgtc

SEQ ID NO: 28819 - DNA, 21 bp, Artificial Sequence
  Description of Artificial Sequence: Synthetic oligonucleotide
gcaggacaaagcgcaccaaga

SEQ ID NO: 28820 - DNA, 21 bp, Artificial Sequence
  Description of Artificial Sequence: Synthetic oligonucleotide
gcaggaagagacagcgcatgg

SEQ ID NO: 28821 - DNA, 21 bp, Artificial Sequence
  Description of Artificial Sequence: Synthetic oligonucleotide
gcaggaagaaacatgcaccca

SEQ ID NO: 28822 - DNA, 21 bp, Artificial Sequence
  Description of Artificial Sequence: Synthetic oligonucleotide
gcaggaagaccaccacaaagc

SEQ ID NO: 28823 - DNA, 21 bp, Artificial Sequence
  Description of Artificial Sequence: Synthetic oligonucleotide
gcaggaagagtcctcacaatg

SEQ ID NO: 28824 - DNA, 21 bp, Artificial Sequence
  Description of Artificial Sequence: Synthetic oligonucleotide
gcaggaagcggaggaagccca

SEQ ID NO: 28825 - DNA, 21 bp, Artificial Sequence
  Description of Artificial Sequence: Synthetic oligonucleotide
gcaggaagcggagtcctcaac

SEQ ID NO: 28826 - DNA, 21 bp, Artificial Sequence
  Description of Artificial Sequence: Synthetic oligonucleotide
gcaggaagccaccaaagcgaa

SEQ ID NO: 28827 - DNA, 21 bp, Artificial Sequence
  Description of Artificial Sequence: Synthetic oligonucleotide
gcaggaagcatcatcagcaga

SEQ ID NO: 28828 - DNA, 21 bp, Artificial Sequence
  Description of Artificial Sequence: Synthetic oligonucleotide
gcaggaagcctcagcgtcgac

SEQ ID NO: 28829 - DNA, 21 bp, Artificial Sequence
  Description of Artificial Sequence: Synthetic oligonucleotide
gcaggaagccaacacccagca

SEQ ID NO: 28830 - DNA, 21 bp, Artificial Sequence
  Description of Artificial Sequence: Synthetic oligonucleotide
gcaggaagccaaacaccacca

SEQ ID NO: 28831 - DNA, 21 bp, Artificial Sequence
  Description of Artificial Sequence: Synthetic oligonucleotide
gcaggaagcagcagaacattc

SEQ ID NO: 28832 - DNA, 21 bp, Artificial Sequence
  Description of Artificial Sequence: Synthetic oligonucleotide
gcaggaacaggactcggaatg

SEQ ID NO: 28833 - DNA, 21 bp, Artificial Sequence
  Description of Artificial Sequence: Synthetic oligonucleotide
gcaggaacaggaccattcgca

SEQ ID NO: 28834 - DNA, 21 bp, Artificial Sequence
  Description of Artificial Sequence: Synthetic oligonucleotide
gcaggaacaatcagaatcagc

SEQ ID NO: 28835 - DNA, 21 bp, Artificial Sequence
  Description of Artificial Sequence: Synthetic oligonucleotide
gcaggaacactcgtcatcatg

SEQ ID NO: 28836 - DNA, 21 bp, Artificial Sequence
  Description of Artificial Sequence: Synthetic oligonucleotide
gcaggaacaaaccaaagaaac

SEQ ID NO: 28837 - DNA, 21 bp, Artificial Sequence
  Description of Artificial Sequence: Synthetic oligonucleotide
gcaggaacacaaccaatgaca

SEQ ID NO: 28838 - DNA, 21 bp, Artificial Sequence
  Description of Artificial Sequence: Synthetic oligonucleotide
gcaggaacacaaagagcatac

SEQ ID NO: 28839 - DNA, 21 bp, Artificial Sequence
  Description of Artificial Sequence: Synthetic oligonucleotide
gcaggaacaagccacagccac

SEQ ID NO: 28840 - DNA, 21 bp, Artificial Sequence
  Description of Artificial Sequence: Synthetic oligonucleotide
gcaggaacagtcgaacacctc

SEQ ID NO: 28841 - DNA, 21 bp, Artificial Sequence
  Description of Artificial Sequence: Synthetic oligonucleotide
gcaggagtcggaaaagcacaa

SEQ ID NO: 28842 - DNA, 21 bp, Artificial Sequence
  Description of Artificial Sequence: Synthetic oligonucleotide
gcaggagtcctcaaaatgagc

SEQ ID NO: 28843 - DNA, 21 bp, Artificial Sequence
  Description of Artificial Sequence: Synthetic oligonucleotide
gcaggagtcccaagaatggaa

SEQ ID NO: 28844 - DNA, 21 bp, Artificial Sequence
  Description of Artificial Sequence: Synthetic oligonucleotide
gcaggagtcccaagcccagca

SEQ ID NO: 28845 - DNA, 21 bp, Artificial Sequence
  Description of Artificial Sequence: Synthetic oligonucleotide
gcaggagtccaaccaggacaa

SEQ ID NO: 28846 - DNA, 21 bp, Artificial Sequence
  Description of Artificial Sequence: Synthetic oligonucleotide
gcaggagtcagcgaagcaatc

SEQ ID NO: 28847 - DNA, 21 bp, Artificial Sequence
  Description of Artificial Sequence: Synthetic oligonucleotide
gcacacgcagtcagcctccaa

SEQ ID NO: 28848 - DNA, 21 bp, Artificial Sequence
  Description of Artificial Sequence: Synthetic oligonucleotide
gcacacgacgaagtcccatac

SEQ ID NO: 28849 - DNA, 21 bp, Artificial Sequence
  Description of Artificial Sequence: Synthetic oligonucleotide
gcacacgacatcccaatgagc

SEQ ID NO: 28850 - DNA, 21 bp, Artificial Sequence
  Description of Artificial Sequence: Synthetic oligonucleotide
gcacacgacaacaaaagcatg

SEQ ID NO: 28851 - DNA, 21 bp, Artificial Sequence
  Description of Artificial Sequence: Synthetic oligonucleotide
gcacacgaagtcctcagcttc

SEQ ID NO: 28852 - DNA, 21 bp, Artificial Sequence
  Description of Artificial Sequence: Synthetic oligonucleotide
gcacacggagaaagcaaacca

SEQ ID NO: 28853 - DNA, 21 bp, Artificial Sequence
  Description of Artificial Sequence: Synthetic oligonucleotide
gcacacggaaacgcaccaagc

SEQ ID NO: 28854 - DNA, 21 bp, Artificial Sequence
  Description of Artificial Sequence: Synthetic oligonucleotide
gcacacggaaacagcagcctc

SEQ ID NO: 28855 - DNA, 21 bp, Artificial Sequence
  Description of Artificial Sequence: Synthetic oligonucleotide
gcacacggaagcctccaagtc

SEQ ID NO: 28856 - DNA, 21 bp, Artificial Sequence
  Description of Artificial Sequence: Synthetic oligonucleotide
gcacacggagtcgcatacatc

SEQ ID NO: 28857 - DNA, 21 bp, Artificial Sequence
  Description of Artificial Sequence: Synthetic oligonucleotide
gcacacggagtcaaaacaagc

SEQ ID NO: 28858 - DNA, 21 bp, Artificial Sequence
  Description of Artificial Sequence: Synthetic oligonucleotide
gcacaccacagcgtcccacca

SEQ ID NO: 28859 - DNA, 21 bp, Artificial Sequence
  Description of Artificial Sequence: Synthetic oligonucleotide
gcacacatcgcaagacacgga

SEQ ID NO: 28860 - DNA, 21 bp, Artificial Sequence
  Description of Artificial Sequence: Synthetic oligonucleotide
gcacacaaaagcctcccactc

SEQ ID NO: 28861 - DNA, 21 bp, Artificial Sequence
  Description of Artificial Sequence: Synthetic oligonucleotide
gcacacctcaaatacggaagc

SEQ ID NO: 28862 - DNA, 21 bp, Artificial Sequence
  Description of Artificial Sequence: Synthetic oligonucleotide
gcacacatggacagaacaagc

SEQ ID NO: 28863 - DNA, 21 bp, Artificial Sequence
  Description of Artificial Sequence: Synthetic oligonucleotide
gcacacatgacagacggagaa

SEQ ID NO: 28864 - DNA, 21 bp, Artificial Sequence
  Description of Artificial Sequence: Synthetic oligonucleotide
gcacacaacgtccaaggagca

SEQ ID NO: 28865 - DNA, 21 bp, Artificial Sequence
  Description of Artificial Sequence: Synthetic oligonucleotide
gcacacccaccacaaccagga

SEQ ID NO: 28866 - DNA, 21 bp, Artificial Sequence
  Description of Artificial Sequence: Synthetic oligonucleotide
gcacacccaagcctcccactc

SEQ ID NO: 28867 - DNA, 21 bp, Artificial Sequence
  Description of Artificial Sequence: Synthetic oligonucleotide
gcacacccaagcagaggaatc

SEQ ID NO: 28868 - DNA, 21 bp, Artificial Sequence
  Description of Artificial Sequence: Synthetic oligonucleotide
gcacacccaagcagccacgga

SEQ ID NO: 28869 - DNA, 21 bp, Artificial Sequence
  Description of Artificial Sequence: Synthetic oligonucleotide
gcacaccaagtcggactcgca

SEQ ID NO: 28870 - DNA, 21 bp, Artificial Sequence
  Description of Artificial Sequence: Synthetic oligonucleotide
gcacacagccacgtcccacca

SEQ ID NO: 28871 - DNA, 21 bp, Artificial Sequence
  Description of Artificial Sequence: Synthetic oligonucleotide
gcacacagcctcaaacaagtc

SEQ ID NO: 28872 - DNA, 21 bp, Artificial Sequence
  Description of Artificial Sequence: Synthetic oligonucleotide
gcacacagcccagcactcgtc

SEQ ID NO: 28873 - DNA, 21 bp, Artificial Sequence
  Description of Artificial Sequence: Synthetic oligonucleotide
gcacacagcagaagcggacca

SEQ ID NO: 28874 - DNA, 21 bp, Artificial Sequence
  Description of Artificial Sequence: Synthetic oligonucleotide
gcacacacactcacagaacca

SEQ ID NO: 28875 - DNA, 21 bp, Artificial Sequence
  Description of Artificial Sequence: Synthetic oligonucleotide
gcacacacaaacctcacaagc

SEQ ID NO: 28876 - DNA, 21 bp, Artificial Sequence
  Description of Artificial Sequence: Synthetic oligonucleotide
gcacacacaagaatcatgcca

SEQ ID NO: 28877 - DNA, 21 bp, Artificial Sequence
  Description of Artificial Sequence: Synthetic oligonucleotide
gcacacgtcaacagcttcagc

SEQ ID NO: 28878 - DNA, 21 bp, Artificial Sequence
  Description of Artificial Sequence: Synthetic oligonucleotide
gcacacgtcccagcagcagac

SEQ ID NO: 28879 - DNA, 21 bp, Artificial Sequence
  Description of Artificial Sequence: Synthetic oligonucleotide
gcacacgtcagccaaagcgga

SEQ ID NO: 28880 - DNA, 21 bp, Artificial Sequence
  Description of Artificial Sequence: Synthetic oligonucleotide
gcaatcgcattcagaagagaa

SEQ ID NO: 28881 - DNA, 21 bp, Artificial Sequence
  Description of Artificial Sequence: Synthetic oligonucleotide
gcaatcgcaccaccatacaca

SEQ ID NO: 28882 - DNA, 21 bp, Artificial Sequence
  Description of Artificial Sequence: Synthetic oligonucleotide
gcaatcgcagtcagcgcagga

SEQ ID NO: 28883 - DNA, 21 bp, Artificial Sequence
  Description of Artificial Sequence: Synthetic oligonucleotide
gcaatcgacagcggataccac

SEQ ID NO: 28884 - DNA, 21 bp, Artificial Sequence
  Description of Artificial Sequence: Synthetic oligonucleotide
gcaatcggagcaatcggaagc

SEQ ID NO: 28885 - DNA, 21 bp, Artificial Sequence
  Description of Artificial Sequence: Synthetic oligonucleotide
gcaatcggaccaagaggagga

SEQ ID NO: 28886 - DNA, 21 bp, Artificial Sequence
  Description of Artificial Sequence: Synthetic oligonucleotide
gcaatcggaagcacaacaagc

SEQ ID NO: 28887 - DNA, 21 bp, Artificial Sequence
  Description of Artificial Sequence: Synthetic oligonucleotide
gcaatccacgcagtcagccca

SEQ ID NO: 28888 - DNA, 21 bp, Artificial Sequence
  Description of Artificial Sequence: Synthetic oligonucleotide
gcaatccacagcacaaaaagc

SEQ ID NO: 28889 - DNA, 21 bp, Artificial Sequence
  Description of Artificial Sequence: Synthetic oligonucleotide
gcaatcaaaggacaagacctc

SEQ ID NO: 28890 - DNA, 21 bp, Artificial Sequence
  Description of Artificial Sequence: Synthetic oligonucleotide
gcaatcaacttccaagcagga

SEQ ID NO: 28891 - DNA, 21 bp, Artificial Sequence
  Description of Artificial Sequence: Synthetic oligonucleotide
gcaatcaaccacgcaatgaca

SEQ ID NO: 28892 - DNA, 21 bp, Artificial Sequence
  Description of Artificial Sequence: Synthetic oligonucleotide
gcaatcccaggacacatcatg

SEQ ID NO: 28893 - DNA, 21 bp, Artificial Sequence
  Description of Artificial Sequence: Synthetic oligonucleotide
gcaatcccaggaagcagcaga

SEQ ID NO: 28894 - DNA, 21 bp, Artificial Sequence
  Description of Artificial Sequence: Synthetic oligonucleotide
gcaatcccaatgacacacgac

SEQ ID NO: 28895 - DNA, 21 bp, Artificial Sequence
  Description of Artificial Sequence: Synthetic oligonucleotide
gcaatcccaaacccactcgac

SEQ ID NO: 28896 - DNA, 21 bp, Artificial Sequence
  Description of Artificial Sequence: Synthetic oligonucleotide
gcaatcagaaacgtcctcgca

SEQ ID NO: 28897 - DNA, 21 bp, Artificial Sequence
  Description of Artificial Sequence: Synthetic oligonucleotide
gcaatcagaagcgcaaacgac

SEQ ID NO: 28898 - DNA, 21 bp, Artificial Sequence
  Description of Artificial Sequence: Synthetic oligonucleotide
gcaatcagaagcccaagccca

SEQ ID NO: 28899 - DNA, 21 bp, Artificial Sequence
  Description of Artificial Sequence: Synthetic oligonucleotide
gcaatcagatacacagaccca

SEQ ID NO: 28900 - DNA, 21 bp, Artificial Sequence
  Description of Artificial Sequence: Synthetic oligonucleotide
gcaatcagcgtcggaggaagc

SEQ ID NO: 28901 - DNA, 21 bp, Artificial Sequence
  Description of Artificial Sequence: Synthetic oligonucleotide
gcaatcacaacagcaagaaac

SEQ ID NO: 28902 - DNA, 21 bp, Artificial Sequence
  Description of Artificial Sequence: Synthetic oligonucleotide
gcaatctacggaggactcaca

SEQ ID NO: 28903 - DNA, 21 bp, Artificial Sequence
  Description of Artificial Sequence: Synthetic oligonucleotide
gcaatctacatgcaacaacca

SEQ ID NO: 28904 - DNA, 21 bp, Artificial Sequence
  Description of Artificial Sequence: Synthetic oligonucleotide
gcaatctaccaaggagtcgac

SEQ ID NO: 28905 - DNA, 21 bp, Artificial Sequence
  Description of Artificial Sequence: Synthetic oligonucleotide
gcaaaagcaagcaaccaagac

SEQ ID NO: 28906 - DNA, 21 bp, Artificial Sequence
  Description of Artificial Sequence: Synthetic oligonucleotide
gcaaaagcaacagcactcgaa

SEQ ID NO: 28907 - DNA, 21 bp, Artificial Sequence
  Description of Artificial Sequence: Synthetic oligonucleotide
gcaaaagacatcggacaaatc

SEQ ID NO: 28908 - DNA, 21 bp, Artificial Sequence
  Description of Artificial Sequence: Synthetic oligonucleotide
gcaaaagacatcccaccaaga

SEQ ID NO: 28909 - DNA, 21 bp, Artificial Sequence
  Description of Artificial Sequence: Synthetic oligonucleotide
gcaaaattcgcaccaagcgaa

SEQ ID NO: 28910 - DNA, 21 bp, Artificial Sequence
  Description of Artificial Sequence: Synthetic oligonucleotide
gcaaaaggagacccaagaatg

SEQ ID NO: 28911 - DNA, 21 bp, Artificial Sequence
  Description of Artificial Sequence: Synthetic oligonucleotide
gcaaaaggacaaatccacgtc

SEQ ID NO: 28912 - DNA, 21 bp, Artificial Sequence
  Description of Artificial Sequence: Synthetic oligonucleotide
gcaaaacacacagaattcagc

SEQ ID NO: 28913 - DNA, 21 bp, Artificial Sequence
  Description of Artificial Sequence: Synthetic oligonucleotide
gcaaaaatcagcagcgcaagc

SEQ ID NO: 28914 - DNA, 21 bp, Artificial Sequence
  Description of Artificial Sequence: Synthetic oligonucleotide
gcaaaactcgaagcaatccca

SEQ ID NO: 28915 - DNA, 21 bp, Artificial Sequence
  Description of Artificial Sequence: Synthetic oligonucleotide
gcaaaaaacagagacagctgc

SEQ ID NO: 28916 - DNA, 21 bp, Artificial Sequence
  Description of Artificial Sequence: Synthetic oligonucleotide
gcaaaaaacagcccacaccca

SEQ ID NO: 28917 - DNA, 21 bp, Artificial Sequence
  Description of Artificial Sequence: Synthetic oligonucleotide
gcaaaaaacagcacattcagc

SEQ ID NO: 28918 - DNA, 21 bp, Artificial Sequence
  Description of Artificial Sequence: Synthetic oligonucleotide
gcaaaaccagcactcctcgtc

SEQ ID NO: 28919 - DNA, 21 bp, Artificial Sequence
  Description of Artificial Sequence: Synthetic oligonucleotide
gcaaaaccacacctccaattc

SEQ ID NO: 28920 - DNA, 21 bp, Artificial Sequence
  Description of Artificial Sequence: Synthetic oligonucleotide
gcaaaaccaatcagaccacca

SEQ ID NO: 28921 - DNA, 21 bp, Artificial Sequence
  Description of Artificial Sequence: Synthetic oligonucleotide
gcaaaaccaagcgaagaaaaa

SEQ ID NO: 28922 - DNA, 21 bp, Artificial Sequence
  Description of Artificial Sequence: Synthetic oligonucleotide
gcaaaaccaacataccaacca

SEQ ID NO: 28923 - DNA, 21 bp, Artificial Sequence
  Description of Artificial Sequence: Synthetic oligonucleotide
gcaaaaagactcgacgacgca

SEQ ID NO: 28924 - DNA, 21 bp, Artificial Sequence
  Description of Artificial Sequence: Synthetic oligonucleotide
gcaaaaagcatcaaactcagc

SEQ ID NO: 28925 - DNA, 21 bp, Artificial Sequence
  Description of Artificial Sequence: Synthetic oligonucleotide
gcaaaaagcaacgtcggactc

SEQ ID NO: 28926 - DNA, 21 bp, Artificial Sequence
  Description of Artificial Sequence: Synthetic oligonucleotide
gcaaaaagcagctacccaatc

SEQ ID NO: 28927 - DNA, 21 bp, Artificial Sequence
  Description of Artificial Sequence: Synthetic oligonucleotide
gcaaaaagcgtcgcactcagc

SEQ ID NO: 28928 - DNA, 21 bp, Artificial Sequence
  Description of Artificial Sequence: Synthetic oligonucleotide
gcaaaaacaatcgaaatcagc

SEQ ID NO: 28929 - DNA, 21 bp, Artificial Sequence
  Description of Artificial Sequence: Synthetic oligonucleotide
gcaaaaacactcagagacgac

SEQ ID NO: 28930 - DNA, 21 bp, Artificial Sequence
  Description of Artificial Sequence: Synthetic oligonucleotide
gcaaaaacaatgggaacaatg

SEQ ID NO: 28931 - DNA, 21 bp, Artificial Sequence
  Description of Artificial Sequence: Synthetic oligonucleotide
gcaaaaacaacactcagcgca

SEQ ID NO: 28932 - DNA, 21 bp, Artificial Sequence
  Description of Artificial Sequence: Synthetic oligonucleotide
gcaaaatacagcccaagcgca

SEQ ID NO: 28933 - DNA, 21 bp, Artificial Sequence
  Description of Artificial Sequence: Synthetic oligonucleotide
gcaaaatacagcagcatgcca

SEQ ID NO: 28934 - DNA, 21 bp, Artificial Sequence
  Description of Artificial Sequence: Synthetic oligonucleotide
gcactcgcaatcggaagagac

SEQ ID NO: 28935 - DNA, 21 bp, Artificial Sequence
  Description of Artificial Sequence: Synthetic oligonucleotide
gcactcgcactcaaaacaagc

SEQ ID NO: 28936 - DNA, 21 bp, Artificial Sequence
  Description of Artificial Sequence: Synthetic oligonucleotide
gcactcgcaacaaaagtcatc

SEQ ID NO: 28937 - DNA, 21 bp, Artificial Sequence
  Description of Artificial Sequence: Synthetic oligonucleotide
gcactcgacgcaagaagagtc

SEQ ID NO: 28938 - DNA, 21 bp, Artificial Sequence
  Description of Artificial Sequence: Synthetic oligonucleotide
gcactcgaccaaatgacaatc

SEQ ID NO: 28939 - DNA, 21 bp, Artificial Sequence
  Description of Artificial Sequence: Synthetic oligonucleotide
gcactcgaatgcccaagagca

SEQ ID NO: 28940 - DNA, 21 bp, Artificial Sequence
  Description of Artificial Sequence: Synthetic oligonucleotide
gcactcgaaggactcagacca

SEQ ID NO: 28941 - DNA, 21 bp, Artificial Sequence
  Description of Artificial Sequence: Synthetic oligonucleotide
gcactcgaactcggaagcgaa

SEQ ID NO: 28942 - DNA, 21 bp, Artificial Sequence
  Description of Artificial Sequence: Synthetic oligonucleotide
gcactcgaaagaacaagcctc

SEQ ID NO: 28943 - DNA, 21 bp, Artificial Sequence
  Description of Artificial Sequence: Synthetic oligonucleotide
gcactcttcccaggaatgagc

SEQ ID NO: 28944 - DNA, 21 bp, Artificial Sequence
  Description of Artificial Sequence: Synthetic oligonucleotide
gcactcggagacttcccaagc

SEQ ID NO: 28945 - DNA, 21 bp, Artificial Sequence
  Description of Artificial Sequence: Synthetic oligonucleotide
gcactcggacaccaagcaatg

SEQ ID NO: 28946 - DNA, 21 bp, Artificial Sequence
  Description of Artificial Sequence: Synthetic oligonucleotide
gcactcggaaacaacaaaagc

SEQ ID NO: 28947 - DNA, 21 bp, Artificial Sequence
  Description of Artificial Sequence: Synthetic oligonucleotide
gcactcggaagaaacgaagga

SEQ ID NO: 28948 - DNA, 21 bp, Artificial Sequence
  Description of Artificial Sequence: Synthetic oligonucleotide
gcactcggagtcccaccaagc

SEQ ID NO: 28949 - DNA, 21 bp, Artificial Sequence
  Description of Artificial Sequence: Synthetic oligonucleotide
gcactcggagtcagcgcactc

SEQ ID NO: 28950 - DNA, 21 bp, Artificial Sequence
  Description of Artificial Sequence: Synthetic oligonucleotide
gcactcggataccacaacaca

SEQ ID NO: 28951 - DNA, 21 bp, Artificial Sequence
  Description of Artificial Sequence: Synthetic oligonucleotide
gcactccacccaagcgcacca

SEQ ID NO: 28952 - DNA, 21 bp, Artificial Sequence
  Description of Artificial Sequence: Synthetic oligonucleotide
gcactcatcgaaagagtcaac

SEQ ID NO: 28953 - DNA, 21 bp, Artificial Sequence
  Description of Artificial Sequence: Synthetic oligonucleotide
gcactcatcaaagtccacaac

SEQ ID NO: 28954 - DNA, 21 bp, Artificial Sequence
  Description of Artificial Sequence: Synthetic oligonucleotide
gcactcatcccaagcccacca

SEQ ID NO: 28955 - DNA, 21 bp, Artificial Sequence
  Description of Artificial Sequence: Synthetic oligonucleotide
gcactcctcgacagcaaactc

SEQ ID NO: 28956 - DNA, 21 bp, Artificial Sequence
  Description of Artificial Sequence: Synthetic oligonucleotide
gcactcctcgaacaaagacca

SEQ ID NO: 28957 - DNA, 21 bp, Artificial Sequence
  Description of Artificial Sequence: Synthetic oligonucleotide
gcactcctcggagtcaacaga

SEQ ID NO: 28958 - DNA, 21 bp, Artificial Sequence
  Description of Artificial Sequence: Synthetic oligonucleotide
gcactcctccacagcatcgga

SEQ ID NO: 28959 - DNA, 21 bp, Artificial Sequence
  Description of Artificial Sequence: Synthetic oligonucleotide
gcactcctccaaaacgcaagc

SEQ ID NO: 28960 - DNA, 21 bp, Artificial Sequence
  Description of Artificial Sequence: Synthetic oligonucleotide
gcactcctcagcagcggaaac

SEQ ID NO: 28961 - DNA, 21 bp, Artificial Sequence
  Description of Artificial Sequence: Synthetic oligonucleotide
gcactcatgagaggaacaatc

SEQ ID NO: 28962 - DNA, 21 bp, Artificial Sequence
  Description of Artificial Sequence: Synthetic oligonucleotide
gcactcaacgacgcagcagga

SEQ ID NO: 28963 - DNA, 21 bp, Artificial Sequence
  Description of Artificial Sequence: Synthetic oligonucleotide
gcactcaaccacgacaaacca

SEQ ID NO: 28964 - DNA, 21 bp, Artificial Sequence
  Description of Artificial Sequence: Synthetic oligonucleotide
gcactcaacatcccagaactc

SEQ ID NO: 28965 - DNA, 21 bp, Artificial Sequence
  Description of Artificial Sequence: Synthetic oligonucleotide
gcactcaacacacacacagtc

SEQ ID NO: 28966 - DNA, 21 bp, Artificial Sequence
  Description of Artificial Sequence: Synthetic oligonucleotide
gcactcccagcaaaaagctac

SEQ ID NO: 28967 - DNA, 21 bp, Artificial Sequence
  Description of Artificial Sequence: Synthetic oligonucleotide
gcactcccagcaagcgtcgac

SEQ ID NO: 28968 - DNA, 21 bp, Artificial Sequence
  Description of Artificial Sequence: Synthetic oligonucleotide
gcactcccaggaacaccaaac

SEQ ID NO: 28969 - DNA, 21 bp, Artificial Sequence
  Description of Artificial Sequence: Synthetic oligonucleotide
gcactcccactcagcagagca

SEQ ID NO: 28970 - DNA, 21 bp, Artificial Sequence
  Description of Artificial Sequence: Synthetic oligonucleotide
gcactcccacaactcgcagtc

SEQ ID NO: 28971 - DNA, 21 bp, Artificial Sequence
  Description of Artificial Sequence: Synthetic oligonucleotide
gcactcccacaaagaagagac

SEQ ID NO: 28972 - DNA, 21 bp, Artificial Sequence
  Description of Artificial Sequence: Synthetic oligonucleotide
gcactcccaagcagcgaccac

SEQ ID NO: 28973 - DNA, 21 bp, Artificial Sequence
  Description of Artificial Sequence: Synthetic oligonucleotide
gcactcccaagcacactcgtc

SEQ ID NO: 28974 - DNA, 21 bp, Artificial Sequence
  Description of Artificial Sequence: Synthetic oligonucleotide
gcactcccaacaacaaaagca

SEQ ID NO: 28975 - DNA, 21 bp, Artificial Sequence
  Description of Artificial Sequence: Synthetic oligonucleotide
gcactccaagcaccacacaca

SEQ ID NO: 28976 - DNA, 21 bp, Artificial Sequence
  Description of Artificial Sequence: Synthetic oligonucleotide
gcactccaaggatacagcgtc

SEQ ID NO: 28977 - DNA, 21 bp, Artificial Sequence
  Description of Artificial Sequence: Synthetic oligonucleotide
gcactccaaagagactggagc

SEQ ID NO: 28978 - DNA, 21 bp, Artificial Sequence
  Description of Artificial Sequence: Synthetic oligonucleotide
gcactccaaagcgacacagtc

SEQ ID NO: 28979 - DNA, 21 bp, Artificial Sequence
  Description of Artificial Sequence: Synthetic oligonucleotide
gcactccaaagcagcgtcaga

SEQ ID NO: 28980 - DNA, 21 bp, Artificial Sequence
  Description of Artificial Sequence: Synthetic oligonucleotide
gcactcagaatgggaatgaca

SEQ ID NO: 28981 - DNA, 21 bp, Artificial Sequence
  Description of Artificial Sequence: Synthetic oligonucleotide
gcactcagaaacccaatcaac

SEQ ID NO: 28982 - DNA, 21 bp, Artificial Sequence
  Description of Artificial Sequence: Synthetic oligonucleotide
gcactcagaacaagcctcaca

SEQ ID NO: 28983 - DNA, 21 bp, Artificial Sequence
  Description of Artificial Sequence: Synthetic oligonucleotide
gcactcagagtcgcagcaatg

SEQ ID NO: 28984 - DNA, 21 bp, Artificial Sequence
  Description of Artificial Sequence: Synthetic oligonucleotide
gcactcagcgcaggaagagtc

SEQ ID NO: 28985 - DNA, 21 bp, Artificial Sequence
  Description of Artificial Sequence: Synthetic oligonucleotide
gcactcagcgaactccaaatc

SEQ ID NO: 28986 - DNA, 21 bp, Artificial Sequence
  Description of Artificial Sequence: Synthetic oligonucleotide
gcactcagcggaacattcgga

SEQ ID NO: 28987 - DNA, 21 bp, Artificial Sequence
  Description of Artificial Sequence: Synthetic oligonucleotide
gcactcagccacgacggaaac

SEQ ID NO: 28988 - DNA, 21 bp, Artificial Sequence
  Description of Artificial Sequence: Synthetic oligonucleotide
gcactcagccacgaaagcaac

SEQ ID NO: 28989 - DNA, 21 bp, Artificial Sequence
  Description of Artificial Sequence: Synthetic oligonucleotide
gcactcagcaaatgggcaatg

SEQ ID NO: 28990 - DNA, 21 bp, Artificial Sequence
  Description of Artificial Sequence: Synthetic oligonucleotide
gcactcagcctcaacacaatc

SEQ ID NO: 28991 - DNA, 21 bp, Artificial Sequence
  Description of Artificial Sequence: Synthetic oligonucleotide
gcactcagcccaatgccatgc

SEQ ID NO: 28992 - DNA, 21 bp, Artificial Sequence
  Description of Artificial Sequence: Synthetic oligonucleotide
gcactcagccaagcagaaaga

SEQ ID NO: 28993 - DNA, 21 bp, Artificial Sequence
  Description of Artificial Sequence: Synthetic oligonucleotide
gcactcagcagagacagacca

SEQ ID NO: 28994 - DNA, 21 bp, Artificial Sequence
  Description of Artificial Sequence: Synthetic oligonucleotide
gcactcagcagcatccacgtc

SEQ ID NO: 28995 - DNA, 21 bp, Artificial Sequence
  Description of Artificial Sequence: Synthetic oligonucleotide
gcactcagcagcagcgcactc

SEQ ID NO: 28996 - DNA, 21 bp, Artificial Sequence
  Description of Artificial Sequence: Synthetic oligonucleotide
gcactcagcacaggaatgcca

SEQ ID NO: 28997 - DNA, 21 bp, Artificial Sequence
  Description of Artificial Sequence: Synthetic oligonucleotide
gcactcagcacaccagtccca

SEQ ID NO: 28998 - DNA, 21 bp, Artificial Sequence
  Description of Artificial Sequence: Synthetic oligonucleotide
gcactcacacactacgaccca

SEQ ID NO: 28999 - DNA, 21 bp, Artificial Sequence
  Description of Artificial Sequence: Synthetic oligonucleotide
gcactcacaaaaaacgtcgca

SEQ ID NO: 29000 - DNA, 21 bp, Artificial Sequence
  Description of Artificial Sequence: Synthetic oligonucleotide
gcactcacaagaagcgcagtc

SEQ ID NO: 29001 - DNA, 21 bp, Artificial Sequence
  Description of Artificial Sequence: Synthetic oligonucleotide
gcactcacaagcacacacgtc

SEQ ID NO: 29002 - DNA, 21 bp, Artificial Sequence
  Description of Artificial Sequence: Synthetic oligonucleotide
gcactcacaacactcgcagaa

SEQ ID NO: 29003 - DNA, 21 bp, Artificial Sequence
  Description of Artificial Sequence: Synthetic oligonucleotide
gcactcacaacactcggacca

SEQ ID NO: 29004 - DNA, 21 bp, Artificial Sequence
  Description of Artificial Sequence: Synthetic oligonucleotide
gcactcacagtcctcctcgaa

SEQ ID NO: 29005 - DNA, 21 bp, Artificial Sequence
  Description of Artificial Sequence: Synthetic oligonucleotide
gcactcgtcagcagcaacctc

SEQ ID NO: 29006 - DNA, 21 bp, Artificial Sequence
  Description of Artificial Sequence: Synthetic oligonucleotide
gcactctacgacaacgcacca

SEQ ID NO: 29007 - DNA, 21 bp, Artificial Sequence
  Description of Artificial Sequence: Synthetic oligonucleotide
gcactctacaacacaccacca

SEQ ID NO: 29008 - DNA, 21 bp, Artificial Sequence
  Description of Artificial Sequence: Synthetic oligonucleotide
gcactctacacacacctcgac

SEQ ID NO: 29009 - DNA, 21 bp, Artificial Sequence
  Description of Artificial Sequence: Synthetic oligonucleotide
gcaatggcagcaagcccagca

SEQ ID NO: 29010 - DNA, 21 bp, Artificial Sequence
  Description of Artificial Sequence: Synthetic oligonucleotide
gcaatggcaccaaaactcagc

SEQ ID NO: 29011 - DNA, 21 bp, Artificial Sequence
  Description of Artificial Sequence: Synthetic oligonucleotide
gcaatggcaagaccaagcgga

SEQ ID NO: 29012 - DNA, 21 bp, Artificial Sequence
  Description of Artificial Sequence: Synthetic oligonucleotide
gcaatggaacacagcgtcaaa

SEQ ID NO: 29013 - DNA, 21 bp, Artificial Sequence
  Description of Artificial Sequence: Synthetic oligonucleotide
gcaatggaaacatgcgacctc

SEQ ID NO: 29014 - DNA, 21 bp, Artificial Sequence
  Description of Artificial Sequence: Synthetic oligonucleotide
gcaatgggaccaagcgcaagc

SEQ ID NO: 29015 - DNA, 21 bp, Artificial Sequence
  Description of Artificial Sequence: Synthetic oligonucleotide
gcaatgatccaaatgagagaa

SEQ ID NO: 29016 - DNA, 21 bp, Artificial Sequence
  Description of Artificial Sequence: Synthetic oligonucleotide
gcaatgaaagcacaaaacaca

SEQ ID NO: 29017 - DNA, 21 bp, Artificial Sequence
  Description of Artificial Sequence: Synthetic oligonucleotide
gcaatgaaagacaacagaagc

SEQ ID NO: 29018 - DNA, 21 bp, Artificial Sequence
  Description of Artificial Sequence: Synthetic oligonucleotide
gcaatgaaactcaacatgcca

SEQ ID NO: 29019 - DNA, 21 bp, Artificial Sequence
  Description of Artificial Sequence: Synthetic oligonucleotide
gcaatgatgcaacacgtcgca

SEQ ID NO: 29020 - DNA, 21 bp, Artificial Sequence
  Description of Artificial Sequence: Synthetic oligonucleotide
gcaatgatgagcgcagaaagc

SEQ ID NO: 29021 - DNA, 21 bp, Artificial Sequence
  Description of Artificial Sequence: Synthetic oligonucleotide
gcaatgccaggactcggagtc

SEQ ID NO: 29022 - DNA, 21 bp, Artificial Sequence
  Description of Artificial Sequence: Synthetic oligonucleotide
gcaatgccaggactccaaagc

SEQ ID NO: 29023 - DNA, 21 bp, Artificial Sequence
  Description of Artificial Sequence: Synthetic oligonucleotide
gcaatgccaagactcacacca

SEQ ID NO: 29024 - DNA, 21 bp, Artificial Sequence
  Description of Artificial Sequence: Synthetic oligonucleotide
gcaatgccaagacaagtcagc

SEQ ID NO: 29025 - DNA, 21 bp, Artificial Sequence
  Description of Artificial Sequence: Synthetic oligonucleotide
gcaatgccaacagtcgtcgca

SEQ ID NO: 29026 - DNA, 21 bp, Artificial Sequence
  Description of Artificial Sequence: Synthetic oligonucleotide
gcaatgcaaacagacagagtc

SEQ ID NO: 29027 - DNA, 21 bp, Artificial Sequence
  Description of Artificial Sequence: Synthetic oligonucleotide
gcaatgagaccaagccacgaa

SEQ ID NO: 29028 - DNA, 21 bp, Artificial Sequence
  Description of Artificial Sequence: Synthetic oligonucleotide
gcaatgagcctcatccacgca

SEQ ID NO: 29029 - DNA, 21 bp, Artificial Sequence
  Description of Artificial Sequence: Synthetic oligonucleotide
gcaatgagcagcgcaagctac

SEQ ID NO: 29030 - DNA, 21 bp, Artificial Sequence
  Description of Artificial Sequence: Synthetic oligonucleotide
gcaatgagcagcatcgcagga

SEQ ID NO: 29031 - DNA, 21 bp, Artificial Sequence
  Description of Artificial Sequence: Synthetic oligonucleotide
gcaatgagcacacaactcagc

SEQ ID NO: 29032 - DNA, 21 bp, Artificial Sequence
  Description of Artificial Sequence: Synthetic oligonucleotide
gcaatgacagacaaagtccaa

SEQ ID NO: 29033 - DNA, 21 bp, Artificial Sequence
  Description of Artificial Sequence: Synthetic oligonucleotide
gcaatgacagacgtcagagga

SEQ ID NO: 29034 - DNA, 21 bp, Artificial Sequence
  Description of Artificial Sequence: Synthetic oligonucleotide
gcaatgacacacatgccaagc

SEQ ID NO: 29035 - DNA, 21 bp, Artificial Sequence
  Description of Artificial Sequence: Synthetic oligonucleotide
gcaatgacactcagaagcgac

SEQ ID NO: 29036 - DNA, 21 bp, Artificial Sequence
  Description of Artificial Sequence: Synthetic oligonucleotide
gcaatgacaagcccaaaactc

SEQ ID NO: 29037 - DNA, 21 bp, Artificial Sequence
  Description of Artificial Sequence: Synthetic oligonucleotide
gcaatgtggggagcagacgca

SEQ ID NO: 29038 - DNA, 21 bp, Artificial Sequence
  Description of Artificial Sequence: Synthetic oligonucleotide
gcaaacgcaggaggaagccca

SEQ ID NO: 29039 - DNA, 21 bp, Artificial Sequence
  Description of Artificial Sequence: Synthetic oligonucleotide
gcaaacgacagcagagcagtc

SEQ ID NO: 29040 - DNA, 21 bp, Artificial Sequence
  Description of Artificial Sequence: Synthetic oligonucleotide
gcaaacgaagacttcagaaaa

SEQ ID NO: 29041 - DNA, 21 bp, Artificial Sequence
  Description of Artificial Sequence: Synthetic oligonucleotide
gcaaacgaaccagacgtcctc

SEQ ID NO: 29042 - DNA, 21 bp, Artificial Sequence
  Description of Artificial Sequence: Synthetic oligonucleotide
gcaaacggagcaagcagccca

SEQ ID NO: 29043 - DNA, 21 bp, Artificial Sequence
  Description of Artificial Sequence: Synthetic oligonucleotide
gcaaaccacggagcaacattc

SEQ ID NO: 29044 - DNA, 21 bp, Artificial Sequence
  Description of Artificial Sequence: Synthetic oligonucleotide
gcaaaccacacaacaagaagc

SEQ ID NO: 29045 - DNA, 21 bp, Artificial Sequence
  Description of Artificial Sequence: Synthetic oligonucleotide
gcaaacaaaccacaagtcaca

SEQ ID NO: 29046 - DNA, 21 bp, Artificial Sequence
  Description of Artificial Sequence: Synthetic oligonucleotide
gcaaacctcggactcccacca

SEQ ID NO: 29047 - DNA, 21 bp, Artificial Sequence
  Description of Artificial Sequence: Synthetic oligonucleotide
gcaaacctcggaagcgcaaga

SEQ ID NO: 29048 - DNA, 21 bp, Artificial Sequence
  Description of Artificial Sequence: Synthetic oligonucleotide
gcaaacctcccaggacacctc

SEQ ID NO: 29049 - DNA, 21 bp, Artificial Sequence
  Description of Artificial Sequence: Synthetic oligonucleotide
gcaaacatgacaagagtcgaa

SEQ ID NO: 29050 - DNA, 21 bp, Artificial Sequence
  Description of Artificial Sequence: Synthetic oligonucleotide
gcaaacatgacagtccactgc

SEQ ID NO: 29051 - DNA, 21 bp, Artificial Sequence
  Description of Artificial Sequence: Synthetic oligonucleotide
gcaaacccagcaaaaacagtc

SEQ ID NO: 29052 - DNA, 21 bp, Artificial Sequence
  Description of Artificial Sequence: Synthetic oligonucleotide
gcaaacccaggaaaaatctac

SEQ ID NO: 29053 - DNA, 21 bp, Artificial Sequence
  Description of Artificial Sequence: Synthetic oligonucleotide
gcaaacccaggaacagcacca

SEQ ID NO: 29054 - DNA, 21 bp, Artificial Sequence
  Description of Artificial Sequence: Synthetic oligonucleotide
gcaaacccactcctcagcagc

SEQ ID NO: 29055 - DNA, 21 bp, Artificial Sequence
  Description of Artificial Sequence: Synthetic oligonucleotide
gcaaaccaaggaatcgacagc

SEQ ID NO: 29056 - DNA, 21 bp, Artificial Sequence
  Description of Artificial Sequence: Synthetic oligonucleotide
gcaaaccaaaacaacaaaaac

SEQ ID NO: 29057 - DNA, 21 bp, Artificial Sequence
  Description of Artificial Sequence: Synthetic oligonucleotide
gcaaaccaaagcctcccaagc

SEQ ID NO: 29058 - DNA, 21 bp, Artificial Sequence
  Description of Artificial Sequence: Synthetic oligonucleotide
gcaaacagaagcggacacgga

SEQ ID NO: 29059 - DNA, 21 bp, Artificial Sequence
  Description of Artificial Sequence: Synthetic oligonucleotide
gcaaacagcgactggggacca

SEQ ID NO: 29060 - DNA, 21 bp, Artificial Sequence
  Description of Artificial Sequence: Synthetic oligonucleotide
gcaaacagcgaagaattcgtc

SEQ ID NO: 29061 - DNA, 21 bp, Artificial Sequence
  Description of Artificial Sequence: Synthetic oligonucleotide
gcaaacagcggaccaccacca

SEQ ID NO: 29062 - DNA, 21 bp, Artificial Sequence
  Description of Artificial Sequence: Synthetic oligonucleotide
gcaaacagccacgaacaaatg

SEQ ID NO: 29063 - DNA, 21 bp, Artificial Sequence
  Description of Artificial Sequence: Synthetic oligonucleotide
gcaaacagccacatgctcaaa

SEQ ID NO: 29064 - DNA, 21 bp, Artificial Sequence
  Description of Artificial Sequence: Synthetic oligonucleotide
gcaaacagcatgatgcaccca

SEQ ID NO: 29065 - DNA, 21 bp, Artificial Sequence
  Description of Artificial Sequence: Synthetic oligonucleotide
gcaaacagcaacagcgtctac

SEQ ID NO: 29066 - DNA, 21 bp, Artificial Sequence
  Description of Artificial Sequence: Synthetic oligonucleotide
gcaaacagcagactcggagga

SEQ ID NO: 29067 - DNA, 21 bp, Artificial Sequence
  Description of Artificial Sequence: Synthetic oligonucleotide
gcaaacagcagaccaacacaa

SEQ ID NO: 29068 - DNA, 21 bp, Artificial Sequence
  Description of Artificial Sequence: Synthetic oligonucleotide
gcaaacagcagaagcatggtc

SEQ ID NO: 29069 - DNA, 21 bp, Artificial Sequence
  Description of Artificial Sequence: Synthetic oligonucleotide
gcaaacagcagcagcccagga

SEQ ID NO: 29070 - DNA, 21 bp, Artificial Sequence
  Description of Artificial Sequence: Synthetic oligonucleotide
gcaaacagcacaaaaggactc

SEQ ID NO: 29071 - DNA, 21 bp, Artificial Sequence
  Description of Artificial Sequence: Synthetic oligonucleotide
gcaaacacagacccaagaaac

SEQ ID NO: 29072 - DNA, 21 bp, Artificial Sequence
  Description of Artificial Sequence: Synthetic oligonucleotide
gcaaacacagaaacaatctgg

SEQ ID NO: 29073 - DNA, 21 bp, Artificial Sequence
  Description of Artificial Sequence: Synthetic oligonucleotide
gcaaacacactcctccacgtc

SEQ ID NO: 29074 - DNA, 21 bp, Artificial Sequence
  Description of Artificial Sequence: Synthetic oligonucleotide
gcaaacgtcgcaagcagcgga

SEQ ID NO: 29075 - DNA, 21 bp, Artificial Sequence
  Description of Artificial Sequence: Synthetic oligonucleotide
gcaaacgtcagcagcacacac

SEQ ID NO: 29076 - DNA, 21 bp, Artificial Sequence
  Description of Artificial Sequence: Synthetic oligonucleotide
gcaaacgtcagcgtccaagtc

SEQ ID NO: 29077 - DNA, 21 bp, Artificial Sequence
  Description of Artificial Sequence: Synthetic oligonucleotide
gcaccagcagaccacagaatg

SEQ ID NO: 29078 - DNA, 21 bp, Artificial Sequence
  Description of Artificial Sequence: Synthetic oligonucleotide
gcaccagcagacatgacaagc

SEQ ID NO: 29079 - DNA, 21 bp, Artificial Sequence
  Description of Artificial Sequence: Synthetic oligonucleotide
gcaccagcagactggccagtc

SEQ ID NO: 29080 - DNA, 21 bp, Artificial Sequence
  Description of Artificial Sequence: Synthetic oligonucleotide
gcaccagcaggaagaccaagc

SEQ ID NO: 29081 - DNA, 21 bp, Artificial Sequence
  Description of Artificial Sequence: Synthetic oligonucleotide
gcaccagcactcggactcgca

SEQ ID NO: 29082 - DNA, 21 bp, Artificial Sequence
  Description of Artificial Sequence: Synthetic oligonucleotide
gcaccagcaaacgacgaagga

SEQ ID NO: 29083 - DNA, 21 bp, Artificial Sequence
  Description of Artificial Sequence: Synthetic oligonucleotide
gcaccagcacaaagactctac

SEQ ID NO: 29084 - DNA, 21 bp, Artificial Sequence
  Description of Artificial Sequence: Synthetic oligonucleotide
gcaccagcaagaatggtcaac

SEQ ID NO: 29085 - DNA, 21 bp, Artificial Sequence
  Description of Artificial Sequence: Synthetic oligonucleotide
gcaccagacggaacatacctc

SEQ ID NO: 29086 - DNA, 21 bp, Artificial Sequence
  Description of Artificial Sequence: Synthetic oligonucleotide
gcaccagacccaagcagcctc

SEQ ID NO: 29087 - DNA, 21 bp, Artificial Sequence
  Description of Artificial Sequence: Synthetic oligonucleotide
gcaccagaagacgcaggaagc

SEQ ID NO: 29088 - DNA, 21 bp, Artificial Sequence
  Description of Artificial Sequence: Synthetic oligonucleotide
gcaccagaaacaaacgacagc

SEQ ID NO: 29089 - DNA, 21 bp, Artificial Sequence
  Description of Artificial Sequence: Synthetic oligonucleotide
gcaccattcaacacacaagga

SEQ ID NO: 29090 - DNA, 21 bp, Artificial Sequence
  Description of Artificial Sequence: Synthetic oligonucleotide
gcaccattcccagaaaaatgg

SEQ ID NO: 29091 - DNA, 21 bp, Artificial Sequence
  Description of Artificial Sequence: Synthetic oligonucleotide
gcaccattcccagaacaacca

SEQ ID NO: 29092 - DNA, 21 bp, Artificial Sequence
  Description of Artificial Sequence: Synthetic oligonucleotide
gcaccaggaatcacaaactac

SEQ ID NO: 29093 - DNA, 21 bp, Artificial Sequence
  Description of Artificial Sequence: Synthetic oligonucleotide
gcaccaggactcagacacagc

SEQ ID NO: 29094 - DNA, 21 bp, Artificial Sequence
  Description of Artificial Sequence: Synthetic oligonucleotide
gcaccaggaagactcagcctc

SEQ ID NO: 29095 - DNA, 21 bp, Artificial Sequence
  Description of Artificial Sequence: Synthetic oligonucleotide
gcaccacacttcccaagcaca

SEQ ID NO: 29096 - DNA, 21 bp, Artificial Sequence
  Description of Artificial Sequence: Synthetic oligonucleotide
gcaccacacctcccaacacac

SEQ ID NO: 29097 - DNA, 21 bp, Artificial Sequence
  Description of Artificial Sequence: Synthetic oligonucleotide
gcaccaatcctcagaacacca

SEQ ID NO: 29098 - DNA, 21 bp, Artificial Sequence
  Description of Artificial Sequence: Synthetic oligonucleotide
gcaccaatcagccaccaaatg

SEQ ID NO: 29099 - DNA, 21 bp, Artificial Sequence
  Description of Artificial Sequence: Synthetic oligonucleotide
gcaccactcgcagtcagacca

SEQ ID NO: 29100 - DNA, 21 bp, Artificial Sequence
  Description of Artificial Sequence: Synthetic oligonucleotide
gcaccactcaaaagcgtccaa

SEQ ID NO: 29101 - DNA, 21 bp, Artificial Sequence
  Description of Artificial Sequence: Synthetic oligonucleotide
gcaccaaacctcctcatcgga

SEQ ID NO: 29102 - DNA, 21 bp, Artificial Sequence
  Description of Artificial Sequence: Synthetic oligonucleotide
gcaccaaacagcggagtcaaa

SEQ ID NO: 29103 - DNA, 21 bp, Artificial Sequence
  Description of Artificial Sequence: Synthetic oligonucleotide
gcaccaaacacaagcgtcaga

SEQ ID NO: 29104 - DNA, 21 bp, Artificial Sequence
  Description of Artificial Sequence: Synthetic oligonucleotide
gcaccaccaaacctcgaaagc

SEQ ID NO: 29105 - DNA, 21 bp, Artificial Sequence
  Description of Artificial Sequence: Synthetic oligonucleotide
gcaccaccaaacgtcagaaca

SEQ ID NO: 29106 - DNA, 21 bp, Artificial Sequence
  Description of Artificial Sequence: Synthetic oligonucleotide
gcaccaccaagcctcagaaca

SEQ ID NO: 29107 - DNA, 21 bp, Artificial Sequence
  Description of Artificial Sequence: Synthetic oligonucleotide
gcaccacaagcaaaaacacca

SEQ ID NO: 29108 - DNA, 21 bp, Artificial Sequence
  Description of Artificial Sequence: Synthetic oligonucleotide
gcaccacaaggaagacaaatc

SEQ ID NO: 29109 - DNA, 21 bp, Artificial Sequence
  Description of Artificial Sequence: Synthetic oligonucleotide
gcaccacaactccaaccagca

SEQ ID NO: 29110 - DNA, 21 bp, Artificial Sequence
  Description of Artificial Sequence: Synthetic oligonucleotide
gcaccacaaccaaaagaccca

SEQ ID NO: 29111 - DNA, 21 bp, Artificial Sequence
  Description of Artificial Sequence: Synthetic oligonucleotide
gcaccaagagcagtcaactac

SEQ ID NO: 29112 - DNA, 21 bp, Artificial Sequence
  Description of Artificial Sequence: Synthetic oligonucleotide
gcaccaagactcacagtcagc

SEQ ID NO: 29113 - DNA, 21 bp, Artificial Sequence
  Description of Artificial Sequence: Synthetic oligonucleotide
gcaccaagaccaccactcgtc

SEQ ID NO: 29114 - DNA, 21 bp, Artificial Sequence
  Description of Artificial Sequence: Synthetic oligonucleotide
gcaccaagacaaacacacaac

SEQ ID NO: 29115 - DNA, 21 bp, Artificial Sequence
  Description of Artificial Sequence: Synthetic oligonucleotide
gcaccaagaacacacagcaca

SEQ ID NO: 29116 - DNA, 21 bp, Artificial Sequence
  Description of Artificial Sequence: Synthetic oligonucleotide
gcaccaagagtcctccaaaca

SEQ ID NO: 29117 - DNA, 21 bp, Artificial Sequence
  Description of Artificial Sequence: Synthetic oligonucleotide
gcaccaagatacgaactcaga

SEQ ID NO: 29118 - DNA, 21 bp, Artificial Sequence
  Description of Artificial Sequence: Synthetic oligonucleotide
gcaccaagcggaagcacaagc

SEQ ID NO: 29119 - DNA, 21 bp, Artificial Sequence
  Description of Artificial Sequence: Synthetic oligonucleotide
gcaccaagcggagtcaaacca

SEQ ID NO: 29120 - DNA, 21 bp, Artificial Sequence
  Description of Artificial Sequence: Synthetic oligonucleotide
gcaccaagcaaaatggcaatc

SEQ ID NO: 29121 - DNA, 21 bp, Artificial Sequence
  Description of Artificial Sequence: Synthetic oligonucleotide
gcaccaagcagatgcgcactc

SEQ ID NO: 29122 - DNA, 21 bp, Artificial Sequence
  Description of Artificial Sequence: Synthetic oligonucleotide
gcaccaagcagcgcagaaaac

SEQ ID NO: 29123 - DNA, 21 bp, Artificial Sequence
  Description of Artificial Sequence: Synthetic oligonucleotide
gcaccaagcacactcaacaac

SEQ ID NO: 29124 - DNA, 21 bp, Artificial Sequence
  Description of Artificial Sequence: Synthetic oligonucleotide
gcaccaagcgtcagaccaatc

SEQ ID NO: 29125 - DNA, 21 bp, Artificial Sequence
  Description of Artificial Sequence: Synthetic oligonucleotide
gcaccaagcgtcgtcacaaca

SEQ ID NO: 29126 - DNA, 21 bp, Artificial Sequence
  Description of Artificial Sequence: Synthetic oligonucleotide
gcaccaacagcaggaagcatg

SEQ ID NO: 29127 - DNA, 21 bp, Artificial Sequence
  Description of Artificial Sequence: Synthetic oligonucleotide
gcaccaacaccacacccaagc

SEQ ID NO: 29128 - DNA, 21 bp, Artificial Sequence
  Description of Artificial Sequence: Synthetic oligonucleotide
gcaccaacaccaaaaggaatc

SEQ ID NO: 29129 - DNA, 21 bp, Artificial Sequence
  Description of Artificial Sequence: Synthetic oligonucleotide
gcaccaacaagaaacccacaa

SEQ ID NO: 29130 - DNA, 21 bp, Artificial Sequence
  Description of Artificial Sequence: Synthetic oligonucleotide
gcaccaacaacaccaagcctc

SEQ ID NO: 29131 - DNA, 21 bp, Artificial Sequence
  Description of Artificial Sequence: Synthetic oligonucleotide
gcaccaacagtcagcaacatc

SEQ ID NO: 29132 - DNA, 21 bp, Artificial Sequence
  Description of Artificial Sequence: Synthetic oligonucleotide
gcaccagtcccagaccaaaca

SEQ ID NO: 29133 - DNA, 21 bp, Artificial Sequence
  Description of Artificial Sequence: Synthetic oligonucleotide
gcaccagtcacagacaacttc

SEQ ID NO: 29134 - DNA, 21 bp, Artificial Sequence
  Description of Artificial Sequence: Synthetic oligonucleotide
gcacaagcactcagaggacac

SEQ ID NO: 29135 - DNA, 21 bp, Artificial Sequence
  Description of Artificial Sequence: Synthetic oligonucleotide
gcacaagcaccaagaacagaa

SEQ ID NO: 29136 - DNA, 21 bp, Artificial Sequence
  Description of Artificial Sequence: Synthetic oligonucleotide
gcacaagcaacaagcagcctc

SEQ ID NO: 29137 - DNA, 21 bp, Artificial Sequence
  Description of Artificial Sequence: Synthetic oligonucleotide
gcacaatgcagcacacacctc

SEQ ID NO: 29138 - DNA, 21 bp, Artificial Sequence
  Description of Artificial Sequence: Synthetic oligonucleotide
gcacaagacagagcaacaaga

SEQ ID NO: 29139 - DNA, 21 bp, Artificial Sequence
  Description of Artificial Sequence: Synthetic oligonucleotide
gcacaattcagcacaaaagac

SEQ ID NO: 29140 - DNA, 21 bp, Artificial Sequence
  Description of Artificial Sequence: Synthetic oligonucleotide
gcacaaggacaaacaatgctc

SEQ ID NO: 29141 - DNA, 21 bp, Artificial Sequence
  Description of Artificial Sequence: Synthetic oligonucleotide
gcacaaggacaagtcacacca

SEQ ID NO: 29142 - DNA, 21 bp, Artificial Sequence
  Description of Artificial Sequence: Synthetic oligonucleotide
gcacaaggatggacaagcgga

SEQ ID NO: 29143 - DNA, 21 bp, Artificial Sequence
  Description of Artificial Sequence: Synthetic oligonucleotide
gcacaacacaaactcggactc

SEQ ID NO: 29144 - DNA, 21 bp, Artificial Sequence
  Description of Artificial Sequence: Synthetic oligonucleotide
gcacaacacagaggagaaaca

SEQ ID NO: 29145 - DNA, 21 bp, Artificial Sequence
  Description of Artificial Sequence: Synthetic oligonucleotide
gcacaaatccacatggaaatg

SEQ ID NO: 29146 - DNA, 21 bp, Artificial Sequence
  Description of Artificial Sequence: Synthetic oligonucleotide
gcacaaaaaccaacaacaatg

SEQ ID NO: 29147 - DNA, 21 bp, Artificial Sequence
  Description of Artificial Sequence: Synthetic oligonucleotide
gcacaaaaaccagtcgtcatc

SEQ ID NO: 29148 - DNA, 21 bp, Artificial Sequence
  Description of Artificial Sequence: Synthetic oligonucleotide
gcacaaaaacaaaaagcacca

SEQ ID NO: 29149 - DNA, 21 bp, Artificial Sequence
  Description of Artificial Sequence: Synthetic oligonucleotide
gcacaaaacatgagaaacaac

SEQ ID NO: 29150 - DNA, 21 bp, Artificial Sequence
  Description of Artificial Sequence: Synthetic oligonucleotide
gcacaaccaggaacagtcttc

SEQ ID NO: 29151 - DNA, 21 bp, Artificial Sequence
  Description of Artificial Sequence: Synthetic oligonucleotide
gcacaaccaagcctctacgca

SEQ ID NO: 29152 - DNA, 21 bp, Artificial Sequence
  Description of Artificial Sequence: Synthetic oligonucleotide
gcacaaccaacaagagcagac

SEQ ID NO: 29153 - DNA, 21 bp, Artificial Sequence
  Description of Artificial Sequence: Synthetic oligonucleotide
gcacaaccagtcagcagactc

SEQ ID NO: 29154 - DNA, 21 bp, Artificial Sequence
  Description of Artificial Sequence: Synthetic oligonucleotide
gcacaaagactcagcggagga

SEQ ID NO: 29155 - DNA, 21 bp, Artificial Sequence
  Description of Artificial Sequence: Synthetic oligonucleotide
gcacaaagaaacacaagccca

SEQ ID NO: 29156 - DNA, 21 bp, Artificial Sequence
  Description of Artificial Sequence: Synthetic oligonucleotide
gcacaaagaccaacaagcgtc

SEQ ID NO: 29157 - DNA, 21 bp, Artificial Sequence
  Description of Artificial Sequence: Synthetic oligonucleotide
gcacaaagcggagcaatcagc

SEQ ID NO: 29158 - DNA, 21 bp, Artificial Sequence
  Description of Artificial Sequence: Synthetic oligonucleotide
gcacaaagcagaagcccactc

SEQ ID NO: 29159 - DNA, 21 bp, Artificial Sequence
  Description of Artificial Sequence: Synthetic oligonucleotide
gcacaaacaagcctcagactc

SEQ ID NO: 29160 - DNA, 21 bp, Artificial Sequence
  Description of Artificial Sequence: Synthetic oligonucleotide
gcacaaacaagcatgcacaca

SEQ ID NO: 29161 - DNA, 21 bp, Artificial Sequence
  Description of Artificial Sequence: Synthetic oligonucleotide
gcacaatacatcccaagcaca

SEQ ID NO: 29162 - DNA, 21 bp, Artificial Sequence
  Description of Artificial Sequence: Synthetic oligonucleotide
gcacaatacccaaaaccaaac

SEQ ID NO: 29163 - DNA, 21 bp, Artificial Sequence
  Description of Artificial Sequence: Synthetic oligonucleotide
gcaagagcaggagacctcgtc

SEQ ID NO: 29164 - DNA, 21 bp, Artificial Sequence
  Description of Artificial Sequence: Synthetic oligonucleotide
gcaagagcacacgacagcaca

SEQ ID NO: 29165 - DNA, 21 bp, Artificial Sequence
  Description of Artificial Sequence: Synthetic oligonucleotide
gcaagagcacacctcacagca

SEQ ID NO: 29166 - DNA, 21 bp, Artificial Sequence
  Description of Artificial Sequence: Synthetic oligonucleotide
gcaagagcactcagcccaaac

SEQ ID NO: 29167 - DNA, 21 bp, Artificial Sequence
  Description of Artificial Sequence: Synthetic oligonucleotide
gcaagagcaccaggagaactc

SEQ ID NO: 29168 - DNA, 21 bp, Artificial Sequence
  Description of Artificial Sequence: Synthetic oligonucleotide
gcaagagcaccaggaccaatc

SEQ ID NO: 29169 - DNA, 21 bp, Artificial Sequence
  Description of Artificial Sequence: Synthetic oligonucleotide
gcaagagcaccaacactcatg

SEQ ID NO: 29170 - DNA, 21 bp, Artificial Sequence
  Description of Artificial Sequence: Synthetic oligonucleotide
gcaagagcaagcccaatgaca

SEQ ID NO: 29171 - DNA, 21 bp, Artificial Sequence
  Description of Artificial Sequence: Synthetic oligonucleotide
gcaagagacttcaacgcaagc

SEQ ID NO: 29172 - DNA, 21 bp, Artificial Sequence
  Description of Artificial Sequence: Synthetic oligonucleotide
gcaagagacggagtcagcctc

SEQ ID NO: 29173 - DNA, 21 bp, Artificial Sequence
  Description of Artificial Sequence: Synthetic oligonucleotide
gcaagagacctcccagcatac

SEQ ID NO: 29174 - DNA, 21 bp, Artificial Sequence
  Description of Artificial Sequence: Synthetic oligonucleotide
gcaagagacatggtcccacac

SEQ ID NO: 29175 - DNA, 21 bp, Artificial Sequence
  Description of Artificial Sequence: Synthetic oligonucleotide
gcaagagaccaaagaagccca

SEQ ID NO: 29176 - DNA, 21 bp, Artificial Sequence
  Description of Artificial Sequence: Synthetic oligonucleotide
gcaagagaacacagccaactc

SEQ ID NO: 29177 - DNA, 21 bp, Artificial Sequence
  Description of Artificial Sequence: Synthetic oligonucleotide
gcaagagaactcggaagaagc

SEQ ID NO: 29178 - DNA, 21 bp, Artificial Sequence
  Description of Artificial Sequence: Synthetic oligonucleotide
gcaagattcgacgtcggaagc

SEQ ID NO: 29179 - DNA, 21 bp, Artificial Sequence
  Description of Artificial Sequence: Synthetic oligonucleotide
gcaagattcgaaacaggacac

SEQ ID NO: 29180 - DNA, 21 bp, Artificial Sequence
  Description of Artificial Sequence: Synthetic oligonucleotide
gcaagaggactcgcagcacac

SEQ ID NO: 29181 - DNA, 21 bp, Artificial Sequence
  Description of Artificial Sequence: Synthetic oligonucleotide
gcaagaggaaacgcacaagca

SEQ ID NO: 29182 - DNA, 21 bp, Artificial Sequence
  Description of Artificial Sequence: Synthetic oligonucleotide
gcaagaggaaacgtcatgatc

SEQ ID NO: 29183 - DNA, 21 bp, Artificial Sequence
  Description of Artificial Sequence: Synthetic oligonucleotide
gcaagaggaagcgacgcaagc

SEQ ID NO: 29184 - DNA, 21 bp, Artificial Sequence
  Description of Artificial Sequence: Synthetic oligonucleotide
gcaagaggaagcatgacactc

SEQ ID NO: 29185 - DNA, 21 bp, Artificial Sequence
  Description of Artificial Sequence: Synthetic oligonucleotide
gcaagaggagtcgcaagccca

SEQ ID NO: 29186 - DNA, 21 bp, Artificial Sequence
  Description of Artificial Sequence: Synthetic oligonucleotide
gcaagacacgcaagcgtcgca

SEQ ID NO: 29187 - DNA, 21 bp, Artificial Sequence
  Description of Artificial Sequence: Synthetic oligonucleotide
gcaagacacatgccaatcgaa

SEQ ID NO: 29188 - DNA, 21 bp, Artificial Sequence
  Description of Artificial Sequence: Synthetic oligonucleotide
gcaagaatctacgaaagccca

SEQ ID NO: 29189 - DNA, 21 bp, Artificial Sequence
  Description of Artificial Sequence: Synthetic oligonucleotide
gcaagactcgcaacaagcgaa

SEQ ID NO: 29190 - DNA, 21 bp, Artificial Sequence
  Description of Artificial Sequence: Synthetic oligonucleotide
gcaagactcggatacgacgga

SEQ ID NO: 29191 - DNA, 21 bp, Artificial Sequence
  Description of Artificial Sequence: Synthetic oligonucleotide
gcaagactcaacttcgcagca

SEQ ID NO: 29192 - DNA, 21 bp, Artificial Sequence
  Description of Artificial Sequence: Synthetic oligonucleotide
gcaagactccaaacagcagtc

SEQ ID NO: 29193 - DNA, 21 bp, Artificial Sequence
  Description of Artificial Sequence: Synthetic oligonucleotide
gcaagaatgggactcggactc

SEQ ID NO: 29194 - DNA, 21 bp, Artificial Sequence
  Description of Artificial Sequence: Synthetic oligonucleotide
gcaagaatgccaatgctcgaa

SEQ ID NO: 29195 - DNA, 21 bp, Artificial Sequence
  Description of Artificial Sequence: Synthetic oligonucleotide
gcaagaatgccaagcccacca

SEQ ID NO: 29196 - DNA, 21 bp, Artificial Sequence
  Description of Artificial Sequence: Synthetic oligonucleotide
gcaagaatggtcgacccaatc

SEQ ID NO: 29197 - DNA, 21 bp, Artificial Sequence
  Description of Artificial Sequence: Synthetic oligonucleotide
gcaagaatggtcggagaacca

SEQ ID NO: 29198 - DNA, 21 bp, Artificial Sequence
  Description of Artificial Sequence: Synthetic oligonucleotide
gcaagaaacccaggaccagac

SEQ ID NO: 29199 - DNA, 21 bp, Artificial Sequence
  Description of Artificial Sequence: Synthetic oligonucleotide
gcaagaaaccaagcagcacaa

SEQ ID NO: 29200 - DNA, 21 bp, Artificial Sequence
  Description of Artificial Sequence: Synthetic oligonucleotide
gcaagaaacagcctcagcgac

SEQ ID NO: 29201 - DNA, 21 bp, Artificial Sequence
  Description of Artificial Sequence: Synthetic oligonucleotide
gcaagaccagaaatcaaatac

SEQ ID NO: 29202 - DNA, 21 bp, Artificial Sequence
  Description of Artificial Sequence: Synthetic oligonucleotide
gcaagaccagaatacagagtc

SEQ ID NO: 29203 - DNA, 21 bp, Artificial Sequence
  Description of Artificial Sequence: Synthetic oligonucleotide
gcaagaccaccaaacagctac

SEQ ID NO: 29204 - DNA, 21 bp, Artificial Sequence
  Description of Artificial Sequence: Synthetic oligonucleotide
gcaagaccaacagaacacgaa

SEQ ID NO: 29205 - DNA, 21 bp, Artificial Sequence
  Description of Artificial Sequence: Synthetic oligonucleotide
gcaagacaacacttcgcacca

SEQ ID NO: 29206 - DNA, 21 bp, Artificial Sequence
  Description of Artificial Sequence: Synthetic oligonucleotide
gcaagacaacacgtcggacca

SEQ ID NO: 29207 - DNA, 21 bp, Artificial Sequence
  Description of Artificial Sequence: Synthetic oligonucleotide
gcaagacaaacaatgaacgaa

SEQ ID NO: 29208 - DNA, 21 bp, Artificial Sequence
  Description of Artificial Sequence: Synthetic oligonucleotide
gcaagaagagacccaccactc

SEQ ID NO: 29209 - DNA, 21 bp, Artificial Sequence
  Description of Artificial Sequence: Synthetic oligonucleotide
gcaagaagcgcagcactcgca

SEQ ID NO: 29210 - DNA, 21 bp, Artificial Sequence
  Description of Artificial Sequence: Synthetic oligonucleotide
gcaagaagcgcacaaacaaac

SEQ ID NO: 29211 - DNA, 21 bp, Artificial Sequence
  Description of Artificial Sequence: Synthetic oligonucleotide
gcaagaagcgacagagtcagc

SEQ ID NO: 29212 - DNA, 21 bp, Artificial Sequence
  Description of Artificial Sequence: Synthetic oligonucleotide
gcaagaagcgaaccaacacca

SEQ ID NO: 29213 - DNA, 21 bp, Artificial Sequence
  Description of Artificial Sequence: Synthetic oligonucleotide
gcaagaagcggagaaggattc

SEQ ID NO: 29214 - DNA, 21 bp, Artificial Sequence
  Description of Artificial Sequence: Synthetic oligonucleotide
gcaagaagccacatcgtcagc

SEQ ID NO: 29215 - DNA, 21 bp, Artificial Sequence
  Description of Artificial Sequence: Synthetic oligonucleotide
gcaagaagcatcagcgtcgtc

SEQ ID NO: 29216 - DNA, 21 bp, Artificial Sequence
  Description of Artificial Sequence: Synthetic oligonucleotide
gcaagaagcatcgtcggacca

SEQ ID NO: 29217 - DNA, 21 bp, Artificial Sequence
  Description of Artificial Sequence: Synthetic oligonucleotide
gcaagaagcaacgaactccac

SEQ ID NO: 29218 - DNA, 21 bp, Artificial Sequence
  Description of Artificial Sequence: Synthetic oligonucleotide
gcaagaagcccagacgtcctc

SEQ ID NO: 29219 - DNA, 21 bp, Artificial Sequence
  Description of Artificial Sequence: Synthetic oligonucleotide
gcaagaagcccacacgtctac

SEQ ID NO: 29220 - DNA, 21 bp, Artificial Sequence
  Description of Artificial Sequence: Synthetic oligonucleotide
gcaagaagcagaccactcgaa

SEQ ID NO: 29221 - DNA, 21 bp, Artificial Sequence
  Description of Artificial Sequence: Synthetic oligonucleotide
gcaagaagcagcgacctcgaa

SEQ ID NO: 29222 - DNA, 21 bp, Artificial Sequence
  Description of Artificial Sequence: Synthetic oligonucleotide
gcaagaagcagcccaccactc

SEQ ID NO: 29223 - DNA, 21 bp, Artificial Sequence
  Description of Artificial Sequence: Synthetic oligonucleotide
gcaagaagcacagtcctcgga

SEQ ID NO: 29224 - DNA, 21 bp, Artificial Sequence
  Description of Artificial Sequence: Synthetic oligonucleotide
gcaagaagcgtcgcaacaagc

SEQ ID NO: 29225 - DNA, 21 bp, Artificial Sequence
  Description of Artificial Sequence: Synthetic oligonucleotide
gcaagaagcgtccaagacagc

SEQ ID NO: 29226 - DNA, 21 bp, Artificial Sequence
  Description of Artificial Sequence: Synthetic oligonucleotide
gcaagaacagcaagcctccca

SEQ ID NO: 29227 - DNA, 21 bp, Artificial Sequence
  Description of Artificial Sequence: Synthetic oligonucleotide
gcaagaacaggagcatacagc

SEQ ID NO: 29228 - DNA, 21 bp, Artificial Sequence
  Description of Artificial Sequence: Synthetic oligonucleotide
gcaagaacactcccacaactc

SEQ ID NO: 29229 - DNA, 21 bp, Artificial Sequence
  Description of Artificial Sequence: Synthetic oligonucleotide
gcaagaacactcagcacacac

SEQ ID NO: 29230 - DNA, 21 bp, Artificial Sequence
  Description of Artificial Sequence: Synthetic oligonucleotide
gcaagaacaccagtcctctac

SEQ ID NO: 29231 - DNA, 21 bp, Artificial Sequence
  Description of Artificial Sequence: Synthetic oligonucleotide
gcaagaacaagcgaagaacca

SEQ ID NO: 29232 - DNA, 21 bp, Artificial Sequence
  Description of Artificial Sequence: Synthetic oligonucleotide
gcaagaacaacagtcggactc

SEQ ID NO: 29233 - DNA, 21 bp, Artificial Sequence
  Description of Artificial Sequence: Synthetic oligonucleotide
gcaagaacagtcccaagcatg

SEQ ID NO: 29234 - DNA, 21 bp, Artificial Sequence
  Description of Artificial Sequence: Synthetic oligonucleotide
gcaagagtcgacgtcagcatg

SEQ ID NO: 29235 - DNA, 21 bp, Artificial Sequence
  Description of Artificial Sequence: Synthetic oligonucleotide
gcaagagtcaacagagaacca

SEQ ID NO: 29236 - DNA, 21 bp, Artificial Sequence
  Description of Artificial Sequence: Synthetic oligonucleotide
gcaagagtcagcctcgaagca

SEQ ID NO: 29237 - DNA, 21 bp, Artificial Sequence
  Description of Artificial Sequence: Synthetic oligonucleotide
gcaagagtcgtcgcaccagaa

SEQ ID NO: 29238 - DNA, 21 bp, Artificial Sequence
  Description of Artificial Sequence: Synthetic oligonucleotide
gcaagatacggaggaatggtc

SEQ ID NO: 29239 - DNA, 21 bp, Artificial Sequence
  Description of Artificial Sequence: Synthetic oligonucleotide
gcaagcgcattcaaacaacca

SEQ ID NO: 29240 - DNA, 21 bp, Artificial Sequence
  Description of Artificial Sequence: Synthetic oligonucleotide
gcaagcgcaggaggacaacca

SEQ ID NO: 29241 - DNA, 21 bp, Artificial Sequence
  Description of Artificial Sequence: Synthetic oligonucleotide
gcaagcgcaggaccaccacca

SEQ ID NO: 29242 - DNA, 21 bp, Artificial Sequence
  Description of Artificial Sequence: Synthetic oligonucleotide
gcaagcgcacaacaagtcagc

SEQ ID NO: 29243 - DNA, 21 bp, Artificial Sequence
  Description of Artificial Sequence: Synthetic oligonucleotide
gcaagcgcaagcaacagagga

SEQ ID NO: 29244 - DNA, 21 bp, Artificial Sequence
  Description of Artificial Sequence: Synthetic oligonucleotide
gcaagctgcagcagcacaaca

SEQ ID NO: 29245 - DNA, 21 bp, Artificial Sequence
  Description of Artificial Sequence: Synthetic oligonucleotide
gcaagcgacgcaagctgcagc

SEQ ID NO: 29246 - DNA, 21 bp, Artificial Sequence
  Description of Artificial Sequence: Synthetic oligonucleotide
gcaagcgacctcagcctcaga

SEQ ID NO: 29247 - DNA, 21 bp, Artificial Sequence
  Description of Artificial Sequence: Synthetic oligonucleotide
gcaagcgacatgctcaaaagc

SEQ ID NO: 29248 - DNA, 21 bp, Artificial Sequence
  Description of Artificial Sequence: Synthetic oligonucleotide
gcaagcgacaacatcagagca

SEQ ID NO: 29249 - DNA, 21 bp, Artificial Sequence
  Description of Artificial Sequence: Synthetic oligonucleotide
gcaagcgacccaatgaaagga

SEQ ID NO: 29250 - DNA, 21 bp, Artificial Sequence
  Description of Artificial Sequence: Synthetic oligonucleotide
gcaagcgacacaacaacaatg

SEQ ID NO: 29251 - DNA, 21 bp, Artificial Sequence
  Description of Artificial Sequence: Synthetic oligonucleotide
gcaagcgacgtcagcagacca

SEQ ID NO: 29252 - DNA, 21 bp, Artificial Sequence
  Description of Artificial Sequence: Synthetic oligonucleotide
gcaagcgaagaaagagcaaac

SEQ ID NO: 29253 - DNA, 21 bp, Artificial Sequence
  Description of Artificial Sequence: Synthetic oligonucleotide
gcaagcgaaaacagccaaaac

SEQ ID NO: 29254 - DNA, 21 bp, Artificial Sequence
  Description of Artificial Sequence: Synthetic oligonucleotide
gcaagcgaaagaaacagactc

SEQ ID NO: 29255 - DNA, 21 bp, Artificial Sequence
  Description of Artificial Sequence: Synthetic oligonucleotide
gcaagcgaagtcagcaacgca

SEQ ID NO: 29256 - DNA, 21 bp, Artificial Sequence
  Description of Artificial Sequence: Synthetic oligonucleotide
gcaagcttctgcacaagctgg

SEQ ID NO: 29257 - DNA, 21 bp, Artificial Sequence
  Description of Artificial Sequence: Synthetic oligonucleotide
gcaagcttccacggaggagtc

SEQ ID NO: 29258 - DNA, 21 bp, Artificial Sequence
  Description of Artificial Sequence: Synthetic oligonucleotide
gcaagcttcatggaagcagca

SEQ ID NO: 29259 - DNA, 21 bp, Artificial Sequence
  Description of Artificial Sequence: Synthetic oligonucleotide
gcaagcttcccagcaacaagc

SEQ ID NO: 29260 - DNA, 21 bp, Artificial Sequence
  Description of Artificial Sequence: Synthetic oligonucleotide
gcaagcttcagactcatggca

SEQ ID NO: 29261 - DNA, 21 bp, Artificial Sequence
  Description of Artificial Sequence: Synthetic oligonucleotide
gcaagcggaagagcagtcgga

SEQ ID NO: 29262 - DNA, 21 bp, Artificial Sequence
  Description of Artificial Sequence: Synthetic oligonucleotide
gcaagcggaagacaagacctc

SEQ ID NO: 29263 - DNA, 21 bp, Artificial Sequence
  Description of Artificial Sequence: Synthetic oligonucleotide
gcaagcggaagcgacgacagc

SEQ ID NO: 29264 - DNA, 21 bp, Artificial Sequence
  Description of Artificial Sequence: Synthetic oligonucleotide
gcaagcggaagcacaagcgga

SEQ ID NO: 29265 - DNA, 21 bp, Artificial Sequence
  Description of Artificial Sequence: Synthetic oligonucleotide
gcaagcggaacaagagcagca

SEQ ID NO: 29266 - DNA, 21 bp, Artificial Sequence
  Description of Artificial Sequence: Synthetic oligonucleotide
gcaagcggaacatacacaagc

SEQ ID NO: 29267 - DNA, 21 bp, Artificial Sequence
  Description of Artificial Sequence: Synthetic oligonucleotide
gcaagcggatacctcccacaa

SEQ ID NO: 29268 - DNA, 21 bp, Artificial Sequence
  Description of Artificial Sequence: Synthetic oligonucleotide
gcaagccacgaaagagacttc

SEQ ID NO: 29269 - DNA, 21 bp, Artificial Sequence
  Description of Artificial Sequence: Synthetic oligonucleotide
gcaagccaccacctcacagaa

SEQ ID NO: 29270 - DNA, 21 bp, Artificial Sequence
  Description of Artificial Sequence: Synthetic oligonucleotide
gcaagccacagaagcggagac

SEQ ID NO: 29271 - DNA, 21 bp, Artificial Sequence
  Description of Artificial Sequence: Synthetic oligonucleotide
gcaagcatccacacaacaagc

SEQ ID NO: 29272 - DNA, 21 bp, Artificial Sequence
  Description of Artificial Sequence: Synthetic oligonucleotide
gcaagcatcagcggaagcgca

SEQ ID NO: 29273 - DNA, 21 bp, Artificial Sequence
  Description of Artificial Sequence: Synthetic oligonucleotide
gcaagcatcagcatcggagca

SEQ ID NO: 29274 - DNA, 21 bp, Artificial Sequence
  Description of Artificial Sequence: Synthetic oligonucleotide
gcaagcctcccaagcccaaga

SEQ ID NO: 29275 - DNA, 21 bp, Artificial Sequence
  Description of Artificial Sequence: Synthetic oligonucleotide
gcaagcctcagagcaacagga

SEQ ID NO: 29276 - DNA, 21 bp, Artificial Sequence
  Description of Artificial Sequence: Synthetic oligonucleotide
gcaagcctcagcgcagcaatg

SEQ ID NO: 29277 - DNA, 21 bp, Artificial Sequence
  Description of Artificial Sequence: Synthetic oligonucleotide
gcaagcctcagcggaagcatg

SEQ ID NO: 29278 - DNA, 21 bp, Artificial Sequence
  Description of Artificial Sequence: Synthetic oligonucleotide
gcaagcctcagcaacctccca

SEQ ID NO: 29279 - DNA, 21 bp, Artificial Sequence
  Description of Artificial Sequence: Synthetic oligonucleotide
gcaagcctcagcccactcctc

SEQ ID NO: 29280 - DNA, 21 bp, Artificial Sequence
  Description of Artificial Sequence: Synthetic oligonucleotide
gcaagcatgaaaccaacaatc

SEQ ID NO: 29281 - DNA, 21 bp, Artificial Sequence
  Description of Artificial Sequence: Synthetic oligonucleotide
gcaagcatgaacggactccca

SEQ ID NO: 29282 - DNA, 21 bp, Artificial Sequence
  Description of Artificial Sequence: Synthetic oligonucleotide
gcaagcatgaacatgaacgca

SEQ ID NO: 29283 - DNA, 21 bp, Artificial Sequence
  Description of Artificial Sequence: Synthetic oligonucleotide
gcaagcaacaaaagcagcctc

SEQ ID NO: 29284 - DNA, 21 bp, Artificial Sequence
  Description of Artificial Sequence: Synthetic oligonucleotide
gcaagcaacagagtcagctac

SEQ ID NO: 29285 - DNA, 21 bp, Artificial Sequence
  Description of Artificial Sequence: Synthetic oligonucleotide
gcaagcaacagcgcactcaga

SEQ ID NO: 29286 - DNA, 21 bp, Artificial Sequence
  Description of Artificial Sequence: Synthetic oligonucleotide
gcaagcccagcagcagtccac

SEQ ID NO: 29287 - DNA, 21 bp, Artificial Sequence
  Description of Artificial Sequence: Synthetic oligonucleotide
gcaagcccactcaacagcagc

SEQ ID NO: 29288 - DNA, 21 bp, Artificial Sequence
  Description of Artificial Sequence: Synthetic oligonucleotide
gcaagcccaccacaaacaaca

SEQ ID NO: 29289 - DNA, 21 bp, Artificial Sequence
  Description of Artificial Sequence: Synthetic oligonucleotide
gcaagcccacaattcaacagc

SEQ ID NO: 29290 - DNA, 21 bp, Artificial Sequence
  Description of Artificial Sequence: Synthetic oligonucleotide
gcaagcccaagaggaagagaa

SEQ ID NO: 29291 - DNA, 21 bp, Artificial Sequence
  Description of Artificial Sequence: Synthetic oligonucleotide
gcaagccaagcagcatgcctc

SEQ ID NO: 29292 - DNA, 21 bp, Artificial Sequence
  Description of Artificial Sequence: Synthetic oligonucleotide
gcaagccaaatcgaaccaaca

SEQ ID NO: 29293 - DNA, 21 bp, Artificial Sequence
  Description of Artificial Sequence: Synthetic oligonucleotide
gcaagccaaatcagaacaaca

SEQ ID NO: 29294 - DNA, 21 bp, Artificial Sequence
  Description of Artificial Sequence: Synthetic oligonucleotide
gcaagccaaccaagcagagtc

SEQ ID NO: 29295 - DNA, 21 bp, Artificial Sequence
  Description of Artificial Sequence: Synthetic oligonucleotide
gcaagccaacaaccaagaagc

SEQ ID NO: 29296 - DNA, 21 bp, Artificial Sequence
  Description of Artificial Sequence: Synthetic oligonucleotide
gcaagccaaagactcggagga

SEQ ID NO: 29297 - DNA, 21 bp, Artificial Sequence
  Description of Artificial Sequence: Synthetic oligonucleotide
gcaagccaaagcagagacgca

SEQ ID NO: 29298 - DNA, 21 bp, Artificial Sequence
  Description of Artificial Sequence: Synthetic oligonucleotide
gcaagccaatacagagaaagc

SEQ ID NO: 29299 - DNA, 21 bp, Artificial Sequence
  Description of Artificial Sequence: Synthetic oligonucleotide
gcaagcagagcaccagcagga

SEQ ID NO: 29300 - DNA, 21 bp, Artificial Sequence
  Description of Artificial Sequence: Synthetic oligonucleotide
gcaagcagagcaccaagcaac

SEQ ID NO: 29301 - DNA, 21 bp, Artificial Sequence
  Description of Artificial Sequence: Synthetic oligonucleotide
gcaagcagagacaacgtcgac

SEQ ID NO: 29302 - DNA, 21 bp, Artificial Sequence
  Description of Artificial Sequence: Synthetic oligonucleotide
gcaagcagaggaatgagcaca

SEQ ID NO: 29303 - DNA, 21 bp, Artificial Sequence
  Description of Artificial Sequence: Synthetic oligonucleotide
gcaagcagaccatacctcgtc

SEQ ID NO: 29304 - DNA, 21 bp, Artificial Sequence
  Description of Artificial Sequence: Synthetic oligonucleotide
gcaagcagaagcacaacaagc

SEQ ID NO: 29305 - DNA, 21 bp, Artificial Sequence
  Description of Artificial Sequence: Synthetic oligonucleotide
gcaagcagaacaatcgcacca

SEQ ID NO: 29306 - DNA, 21 bp, Artificial Sequence
  Description of Artificial Sequence: Synthetic oligonucleotide
gcaagcagaacaacaccactc

SEQ ID NO: 29307 - DNA, 21 bp, Artificial Sequence
  Description of Artificial Sequence: Synthetic oligonucleotide
gcaagcagcgcaagaccaatc

SEQ ID NO: 29308 - DNA, 21 bp, Artificial Sequence
  Description of Artificial Sequence: Synthetic oligonucleotide
gcaagcagcgcagtcctcaca

SEQ ID NO: 29309 - DNA, 21 bp, Artificial Sequence
  Description of Artificial Sequence: Synthetic oligonucleotide
gcaagcagcgaaagaggagaa

SEQ ID NO: 29310 - DNA, 21 bp, Artificial Sequence
  Description of Artificial Sequence: Synthetic oligonucleotide
gcaagcagcggagacgtcctc

SEQ ID NO: 29311 - DNA, 21 bp, Artificial Sequence
  Description of Artificial Sequence: Synthetic oligonucleotide
gcaagcagcggaccagacaaa

SEQ ID NO: 29312 - DNA, 21 bp, Artificial Sequence
  Description of Artificial Sequence: Synthetic oligonucleotide
gcaagcagcggaagaagcgca

SEQ ID NO: 29313 - DNA, 21 bp, Artificial Sequence
  Description of Artificial Sequence: Synthetic oligonucleotide
gcaagcagcggaagcggaaca

SEQ ID NO: 29314 - DNA, 21 bp, Artificial Sequence
  Description of Artificial Sequence: Synthetic oligonucleotide
gcaagcagcaaaggaagcaac

SEQ ID NO: 29315 - DNA, 21 bp, Artificial Sequence
  Description of Artificial Sequence: Synthetic oligonucleotide
gcaagcagcaaaccagcaaac

SEQ ID NO: 29316 - DNA, 21 bp, Artificial Sequence
  Description of Artificial Sequence: Synthetic oligonucleotide
gcaagcagcaaaccactcgga

SEQ ID NO: 29317 - DNA, 21 bp, Artificial Sequence
  Description of Artificial Sequence: Synthetic oligonucleotide
gcaagcagcccaaaaatctac

SEQ ID NO: 29318 - DNA, 21 bp, Artificial Sequence
  Description of Artificial Sequence: Synthetic oligonucleotide
gcaagcagcccagtcctcagc

SEQ ID NO: 29319 - DNA, 21 bp, Artificial Sequence
  Description of Artificial Sequence: Synthetic oligonucleotide
gcaagcagccaacacggactc

SEQ ID NO: 29320 - DNA, 21 bp, Artificial Sequence
  Description of Artificial Sequence: Synthetic oligonucleotide
gcaagcagcagaacagtcaac

SEQ ID NO: 29321 - DNA, 21 bp, Artificial Sequence
  Description of Artificial Sequence: Synthetic oligonucleotide
gcaagcagcagcgacagcaga

SEQ ID NO: 29322 - DNA, 21 bp, Artificial Sequence
  Description of Artificial Sequence: Synthetic oligonucleotide
gcaagcagcagcctcagcttc

SEQ ID NO: 29323 - DNA, 21 bp, Artificial Sequence
  Description of Artificial Sequence: Synthetic oligonucleotide
gcaagcagcacaagcctcgaa

SEQ ID NO: 29324 - DNA, 21 bp, Artificial Sequence
  Description of Artificial Sequence: Synthetic oligonucleotide
gcaagcagcgtcaacccaagc

SEQ ID NO: 29325 - DNA, 21 bp, Artificial Sequence
  Description of Artificial Sequence: Synthetic oligonucleotide
gcaagcacagcactcctcctc

SEQ ID NO: 29326 - DNA, 21 bp, Artificial Sequence
  Description of Artificial Sequence: Synthetic oligonucleotide
gcaagcacaggaatcgtcctc

SEQ ID NO: 29327 - DNA, 21 bp, Artificial Sequence
  Description of Artificial Sequence: Synthetic oligonucleotide
gcaagcacaggaagcttcgga

SEQ ID NO: 29328 - DNA, 21 bp, Artificial Sequence
  Description of Artificial Sequence: Synthetic oligonucleotide
gcaagcacaggaagccaagaa

SEQ ID NO: 29329 - DNA, 21 bp, Artificial Sequence
  Description of Artificial Sequence: Synthetic oligonucleotide
gcaagcacactccaagtcgga

SEQ ID NO: 29330 - DNA, 21 bp, Artificial Sequence
  Description of Artificial Sequence: Synthetic oligonucleotide
gcaagcacaccaaacctcctc

SEQ ID NO: 29331 - DNA, 21 bp, Artificial Sequence
  Description of Artificial Sequence: Synthetic oligonucleotide
gcaagcacacaaaaacaagca

SEQ ID NO: 29332 - DNA, 21 bp, Artificial Sequence
  Description of Artificial Sequence: Synthetic oligonucleotide
gcaagcacaagaatgctcttc

SEQ ID NO: 29333 - DNA, 21 bp, Artificial Sequence
  Description of Artificial Sequence: Synthetic oligonucleotide
gcaagcacaacattcagacca

SEQ ID NO: 29334 - DNA, 21 bp, Artificial Sequence
  Description of Artificial Sequence: Synthetic oligonucleotide
gcaagcacaacaagaatgctc

SEQ ID NO: 29335 - DNA, 21 bp, Artificial Sequence
  Description of Artificial Sequence: Synthetic oligonucleotide
gcaagcgtcctccaagaagca

SEQ ID NO: 29336 - DNA, 21 bp, Artificial Sequence
  Description of Artificial Sequence: Synthetic oligonucleotide
gcaagcgtcccactcatccca

SEQ ID NO: 29337 - DNA, 21 bp, Artificial Sequence
  Description of Artificial Sequence: Synthetic oligonucleotide
gcaagcgtcagaatgggagac

SEQ ID NO: 29338 - DNA, 21 bp, Artificial Sequence
  Description of Artificial Sequence: Synthetic oligonucleotide
gcaagcgtcagcatggtcgca

SEQ ID NO: 29339 - DNA, 21 bp, Artificial Sequence
  Description of Artificial Sequence: Synthetic oligonucleotide
gcaagcgtcagcacagaagga

SEQ ID NO: 29340 - DNA, 21 bp, Artificial Sequence
  Description of Artificial Sequence: Synthetic oligonucleotide
gcaagctgggacatcaacatc

SEQ ID NO: 29341 - DNA, 21 bp, Artificial Sequence
  Description of Artificial Sequence: Synthetic oligonucleotide
gcaagctgggacagcaacatc

SEQ ID NO: 29342 - DNA, 21 bp, Artificial Sequence
  Description of Artificial Sequence: Synthetic oligonucleotide
gcaagctacgacacaagcaga

SEQ ID NO: 29343 - DNA, 21 bp, Artificial Sequence
  Description of Artificial Sequence: Synthetic oligonucleotide
gcaagctacgacgtcagcagc

SEQ ID NO: 29344 - DNA, 21 bp, Artificial Sequence
  Description of Artificial Sequence: Synthetic oligonucleotide
gcaacagcagcaacagcatac

SEQ ID NO: 29345 - DNA, 21 bp, Artificial Sequence
  Description of Artificial Sequence: Synthetic oligonucleotide
gcaacagcagcaacaacaagc

SEQ ID NO: 29346 - DNA, 21 bp, Artificial Sequence
  Description of Artificial Sequence: Synthetic oligonucleotide
gcaacagcaggactctaccaa

SEQ ID NO: 29347 - DNA, 21 bp, Artificial Sequence
  Description of Artificial Sequence: Synthetic oligonucleotide
gcaacagcaaaaatcctcgac

SEQ ID NO: 29348 - DNA, 21 bp, Artificial Sequence
  Description of Artificial Sequence: Synthetic oligonucleotide
gcaacagcaaaactcctccca

SEQ ID NO: 29349 - DNA, 21 bp, Artificial Sequence
  Description of Artificial Sequence: Synthetic oligonucleotide
gcaacagcaaaaccactcatc

SEQ ID NO: 29350 - DNA, 21 bp, Artificial Sequence
  Description of Artificial Sequence: Synthetic oligonucleotide
gcaacagcaagacaagtccaa

SEQ ID NO: 29351 - DNA, 21 bp, Artificial Sequence
  Description of Artificial Sequence: Synthetic oligonucleotide
gcaacagcaagcacaagcagc

SEQ ID NO: 29352 - DNA, 21 bp, Artificial Sequence
  Description of Artificial Sequence: Synthetic oligonucleotide
gcaacagcaagctacaacgga

SEQ ID NO: 29353 - DNA, 21 bp, Artificial Sequence
  Description of Artificial Sequence: Synthetic oligonucleotide
gcaacagcagtccacgactac

SEQ ID NO: 29354 - DNA, 21 bp, Artificial Sequence
  Description of Artificial Sequence: Synthetic oligonucleotide
gcaacagaccacatgagccca

SEQ ID NO: 29355 - DNA, 21 bp, Artificial Sequence
  Description of Artificial Sequence: Synthetic oligonucleotide
gcaacagactaccaaagcatg

SEQ ID NO: 29356 - DNA, 21 bp, Artificial Sequence
  Description of Artificial Sequence: Synthetic oligonucleotide
gcaacagaagcaccactcaaa

SEQ ID NO: 29357 - DNA, 21 bp, Artificial Sequence
  Description of Artificial Sequence: Synthetic oligonucleotide
gcaacagaaggacacccatgg

SEQ ID NO: 29358 - DNA, 21 bp, Artificial Sequence
  Description of Artificial Sequence: Synthetic oligonucleotide
gcaacattcgtcacaagcaaa

SEQ ID NO: 29359 - DNA, 21 bp, Artificial Sequence
  Description of Artificial Sequence: Synthetic oligonucleotide
gcaacaggaggacacagccca

SEQ ID NO: 29360 - DNA, 21 bp, Artificial Sequence
  Description of Artificial Sequence: Synthetic oligonucleotide
gcaacaggaacaagcgcagga

SEQ ID NO: 29361 - DNA, 21 bp, Artificial Sequence
  Description of Artificial Sequence: Synthetic oligonucleotide
gcaacaggagtcctcatgagc

SEQ ID NO: 29362 - DNA, 21 bp, Artificial Sequence
  Description of Artificial Sequence: Synthetic oligonucleotide
gcaacaggagtccaaaactac

SEQ ID NO: 29363 - DNA, 21 bp, Artificial Sequence
  Description of Artificial Sequence: Synthetic oligonucleotide
gcaacacacatcctcaaactc

SEQ ID NO: 29364 - DNA, 21 bp, Artificial Sequence
  Description of Artificial Sequence: Synthetic oligonucleotide
gcaacacacagcctcctcagc

SEQ ID NO: 29365 - DNA, 21 bp, Artificial Sequence
  Description of Artificial Sequence: Synthetic oligonucleotide
gcaacacacgtctgcgtcagc

SEQ ID NO: 29366 - DNA, 21 bp, Artificial Sequence
  Description of Artificial Sequence: Synthetic oligonucleotide
gcaacaatcccaagaacacca

SEQ ID NO: 29367 - DNA, 21 bp, Artificial Sequence
  Description of Artificial Sequence: Synthetic oligonucleotide
gcaacaaaattccaaggaatg

SEQ ID NO: 29368 - DNA, 21 bp, Artificial Sequence
  Description of Artificial Sequence: Synthetic oligonucleotide
gcaacaaaaggaatcagcttc

SEQ ID NO: 29369 - DNA, 21 bp, Artificial Sequence
  Description of Artificial Sequence: Synthetic oligonucleotide
gcaacaaaacacgactgcaaa

SEQ ID NO: 29370 - DNA, 21 bp, Artificial Sequence
  Description of Artificial Sequence: Synthetic oligonucleotide
gcaacactccacagagaactc

SEQ ID NO: 29371 - DNA, 21 bp, Artificial Sequence
  Description of Artificial Sequence: Synthetic oligonucleotide
gcaacactcaaaatcccagtc

SEQ ID NO: 29372 - DNA, 21 bp, Artificial Sequence
  Description of Artificial Sequence: Synthetic oligonucleotide
gcaacactcagaatcgtcgaa

SEQ ID NO: 29373 - DNA, 21 bp, Artificial Sequence
  Description of Artificial Sequence: Synthetic oligonucleotide
gcaacactcagaccaaacgac

SEQ ID NO: 29374 - DNA, 21 bp, Artificial Sequence
  Description of Artificial Sequence: Synthetic oligonucleotide
gcaacactcagaacagcaaca

SEQ ID NO: 29375 - DNA, 21 bp, Artificial Sequence
  Description of Artificial Sequence: Synthetic oligonucleotide
gcaacactcagcacaaacgca

SEQ ID NO: 29376 - DNA, 21 bp, Artificial Sequence
  Description of Artificial Sequence: Synthetic oligonucleotide
gcaacactcacactcagcgca

SEQ ID NO: 29377 - DNA, 21 bp, Artificial Sequence
  Description of Artificial Sequence: Synthetic oligonucleotide
gcaacactcgtcagcgcagaa

SEQ ID NO: 29378 - DNA, 21 bp, Artificial Sequence
  Description of Artificial Sequence: Synthetic oligonucleotide
gcaacaatgccaagcacaatg

SEQ ID NO: 29379 - DNA, 21 bp, Artificial Sequence
  Description of Artificial Sequence: Synthetic oligonucleotide
gcaacaatgagaccaagagac

SEQ ID NO: 29380 - DNA, 21 bp, Artificial Sequence
  Description of Artificial Sequence: Synthetic oligonucleotide
gcaacaatgagcctcagcagc

SEQ ID NO: 29381 - DNA, 21 bp, Artificial Sequence
  Description of Artificial Sequence: Synthetic oligonucleotide
gcaacaatgagcatgagagga

SEQ ID NO: 29382 - DNA, 21 bp, Artificial Sequence
  Description of Artificial Sequence: Synthetic oligonucleotide
gcaacaatggtcacaacaagc

SEQ ID NO: 29383 - DNA, 21 bp, Artificial Sequence
  Description of Artificial Sequence: Synthetic oligonucleotide
gcaacaaacgcacaccaaagc

SEQ ID NO: 29384 - DNA, 21 bp, Artificial Sequence
  Description of Artificial Sequence: Synthetic oligonucleotide
gcaacaaacagattcccaagc

SEQ ID NO: 29385 - DNA, 21 bp, Artificial Sequence
  Description of Artificial Sequence: Synthetic oligonucleotide
gcaacaaacagcagcgcaaca

SEQ ID NO: 29386 - DNA, 21 bp, Artificial Sequence
  Description of Artificial Sequence: Synthetic oligonucleotide
gcaacaaacacaagaatcgca

SEQ ID NO: 29387 - DNA, 21 bp, Artificial Sequence
  Description of Artificial Sequence: Synthetic oligonucleotide
gcaacaccactcagaacaagc

SEQ ID NO: 29388 - DNA, 21 bp, Artificial Sequence
  Description of Artificial Sequence: Synthetic oligonucleotide
gcaacaccaccaatgcaaaac

SEQ ID NO: 29389 - DNA, 21 bp, Artificial Sequence
  Description of Artificial Sequence: Synthetic oligonucleotide
gcaacaccaagcgcagcaatc

SEQ ID NO: 29390 - DNA, 21 bp, Artificial Sequence
  Description of Artificial Sequence: Synthetic oligonucleotide
gcaacaccaacactcagcgca

SEQ ID NO: 29391 - DNA, 21 bp, Artificial Sequence
  Description of Artificial Sequence: Synthetic oligonucleotide
gcaacaccagtcccacaccca

SEQ ID NO: 29392 - DNA, 21 bp, Artificial Sequence
  Description of Artificial Sequence: Synthetic oligonucleotide
gcaacacaaaacctcccacca

SEQ ID NO: 29393 - DNA, 21 bp, Artificial Sequence
  Description of Artificial Sequence: Synthetic oligonucleotide
gcaacacaaagaatcgtctac

SEQ ID NO: 29394 - DNA, 21 bp, Artificial Sequence
  Description of Artificial Sequence: Synthetic oligonucleotide
gcaacacaatacggaatgaac

SEQ ID NO: 29395 - DNA, 21 bp, Artificial Sequence
  Description of Artificial Sequence: Synthetic oligonucleotide
gcaacaagagcagaaagcagc

SEQ ID NO: 29396 - DNA, 21 bp, Artificial Sequence
  Description of Artificial Sequence: Synthetic oligonucleotide
gcaacaagactcccagacagc

SEQ ID NO: 29397 - DNA, 21 bp, Artificial Sequence
  Description of Artificial Sequence: Synthetic oligonucleotide
gcaacaagactcacagaaaaa

SEQ ID NO: 29398 - DNA, 21 bp, Artificial Sequence
  Description of Artificial Sequence: Synthetic oligonucleotide
gcaacaagaccacaagcagac

SEQ ID NO: 29399 - DNA, 21 bp, Artificial Sequence
  Description of Artificial Sequence: Synthetic oligonucleotide
gcaacaagaacaagcctcgaa

SEQ ID NO: 29400 - DNA, 21 bp, Artificial Sequence
  Description of Artificial Sequence: Synthetic oligonucleotide
gcaacaagcatcacaaaaagc

SEQ ID NO: 29401 - DNA, 21 bp, Artificial Sequence
  Description of Artificial Sequence: Synthetic oligonucleotide
gcaacaagccaaatgaacttc

SEQ ID NO: 29402 - DNA, 21 bp, Artificial Sequence
  Description of Artificial Sequence: Synthetic oligonucleotide
gcaacaagcacactcaacctc

SEQ ID NO: 29403 - DNA, 21 bp, Artificial Sequence
  Description of Artificial Sequence: Synthetic oligonucleotide
gcaacaagcacaatgacaaca

SEQ ID NO: 29404 - DNA, 21 bp, Artificial Sequence
  Description of Artificial Sequence: Synthetic oligonucleotide
gcaacaagcacagtcttcaga

SEQ ID NO: 29405 - DNA, 21 bp, Artificial Sequence
  Description of Artificial Sequence: Synthetic oligonucleotide
gcaacaacagcaggaagcaac

SEQ ID NO: 29406 - DNA, 21 bp, Artificial Sequence
  Description of Artificial Sequence: Synthetic oligonucleotide
gcaacaacagcaatgggagaa

SEQ ID NO: 29407 - DNA, 21 bp, Artificial Sequence
  Description of Artificial Sequence: Synthetic oligonucleotide
gcaacaacaggaccaccatgc

SEQ ID NO: 29408 - DNA, 21 bp, Artificial Sequence
  Description of Artificial Sequence: Synthetic oligonucleotide
gcaacaacaaaagacacaaca

SEQ ID NO: 29409 - DNA, 21 bp, Artificial Sequence
  Description of Artificial Sequence: Synthetic oligonucleotide
gcaacaacactcatcagacca

SEQ ID NO: 29410 - DNA, 21 bp, Artificial Sequence
  Description of Artificial Sequence: Synthetic oligonucleotide
gcaacaacaagcagaagcagc

SEQ ID NO: 29411 - DNA, 21 bp, Artificial Sequence
  Description of Artificial Sequence: Synthetic oligonucleotide
gcaacaacagtcgcaagcaga

SEQ ID NO: 29412 - DNA, 21 bp, Artificial Sequence
  Description of Artificial Sequence: Synthetic oligonucleotide
gcaacagtcatgccaacagca

SEQ ID NO: 29413 - DNA, 21 bp, Artificial Sequence
  Description of Artificial Sequence: Synthetic oligonucleotide
gcaacagtcatgacactccca

SEQ ID NO: 29414 - DNA, 21 bp, Artificial Sequence
  Description of Artificial Sequence: Synthetic oligonucleotide
gcaacagtcaacccagcagtc

SEQ ID NO: 29415 - DNA, 21 bp, Artificial Sequence
  Description of Artificial Sequence: Synthetic oligonucleotide
gcaacagtcccacaaagaaca

SEQ ID NO: 29416 - DNA, 21 bp, Artificial Sequence
  Description of Artificial Sequence: Synthetic oligonucleotide
gcaacagtcagaacaatgctc

SEQ ID NO: 29417 - DNA, 21 bp, Artificial Sequence
  Description of Artificial Sequence: Synthetic oligonucleotide
gcaacagtcagcgacacactc

SEQ ID NO: 29418 - DNA, 21 bp, Artificial Sequence
  Description of Artificial Sequence: Synthetic oligonucleotide
gcaacagtcagcagcctcaca

SEQ ID NO: 29419 - DNA, 21 bp, Artificial Sequence
  Description of Artificial Sequence: Synthetic oligonucleotide
gcaacatggccatacaaagaa

SEQ ID NO: 29420 - DNA, 21 bp, Artificial Sequence
  Description of Artificial Sequence: Synthetic oligonucleotide
gcaacatacgcaagaaacgaa

SEQ ID NO: 29421 - DNA, 21 bp, Artificial Sequence
  Description of Artificial Sequence: Synthetic oligonucleotide
gcaacatacacagcaacagca

SEQ ID NO: 29422 - DNA, 21 bp, Artificial Sequence
  Description of Artificial Sequence: Synthetic oligonucleotide
gcagtcgcaggaacactcaga

SEQ ID NO: 29423 - DNA, 21 bp, Artificial Sequence
  Description of Artificial Sequence: Synthetic oligonucleotide
gcagtcgcactcaacacaaca

SEQ ID NO: 29424 - DNA, 21 bp, Artificial Sequence
  Description of Artificial Sequence: Synthetic oligonucleotide
gcagtcgcacaaatgggaatc

SEQ ID NO: 29425 - DNA, 21 bp, Artificial Sequence
  Description of Artificial Sequence: Synthetic oligonucleotide
gcagtcgcagtcgacttcgtc

SEQ ID NO: 29426 - DNA, 21 bp, Artificial Sequence
  Description of Artificial Sequence: Synthetic oligonucleotide
gcagtcgaccacgaaggactc

SEQ ID NO: 29427 - DNA, 21 bp, Artificial Sequence
  Description of Artificial Sequence: Synthetic oligonucleotide
gcagtcgacccaggaaaccca

SEQ ID NO: 29428 - DNA, 21 bp, Artificial Sequence
  Description of Artificial Sequence: Synthetic oligonucleotide
gcagtcgacagaagcgaaatc

SEQ ID NO: 29429 - DNA, 21 bp, Artificial Sequence
  Description of Artificial Sequence: Synthetic oligonucleotide
gcagtcgaatgcatgccacca

SEQ ID NO: 29430 - DNA, 21 bp, Artificial Sequence
  Description of Artificial Sequence: Synthetic oligonucleotide
gcagtcgaaccaatgtgggaa

SEQ ID NO: 29431 - DNA, 21 bp, Artificial Sequence
  Description of Artificial Sequence: Synthetic oligonucleotide
gcagtcgaaacaggatacaca

SEQ ID NO: 29432 - DNA, 21 bp, Artificial Sequence
  Description of Artificial Sequence: Synthetic oligonucleotide
gcagtcttcgcaagactccca

SEQ ID NO: 29433 - DNA, 21 bp, Artificial Sequence
  Description of Artificial Sequence: Synthetic oligonucleotide
gcagtcggagaaagcgaagtc

SEQ ID NO: 29434 - DNA, 21 bp, Artificial Sequence
  Description of Artificial Sequence: Synthetic oligonucleotide
gcagtcggaaacagcctctac

SEQ ID NO: 29435 - DNA, 21 bp, Artificial Sequence
  Description of Artificial Sequence: Synthetic oligonucleotide
gcagtcggacaaaacatgaga

SEQ ID NO: 29436 - DNA, 21 bp, Artificial Sequence
  Description of Artificial Sequence: Synthetic oligonucleotide
gcagtccacaaaatggacatg

SEQ ID NO: 29437 - DNA, 21 bp, Artificial Sequence
  Description of Artificial Sequence: Synthetic oligonucleotide
gcagtccaccaactcacactc

SEQ ID NO: 29438 - DNA, 21 bp, Artificial Sequence
  Description of Artificial Sequence: Synthetic oligonucleotide
gcagtccacagagaaaacgtc

SEQ ID NO: 29439 - DNA, 21 bp, Artificial Sequence
  Description of Artificial Sequence: Synthetic oligonucleotide
gcagtcatcggaggaatgaca

SEQ ID NO: 29440 - DNA, 21 bp, Artificial Sequence
  Description of Artificial Sequence: Synthetic oligonucleotide
gcagtcaaaggaatgccactc

SEQ ID NO: 29441 - DNA, 21 bp, Artificial Sequence
  Description of Artificial Sequence: Synthetic oligonucleotide
gcagtcaaacaactcatcgtc

SEQ ID NO: 29442 - DNA, 21 bp, Artificial Sequence
  Description of Artificial Sequence: Synthetic oligonucleotide
gcagtcctccacacactcgga

SEQ ID NO: 29443 - DNA, 21 bp, Artificial Sequence
  Description of Artificial Sequence: Synthetic oligonucleotide
gcagtcctcaaaaacagagac

SEQ ID NO: 29444 - DNA, 21 bp, Artificial Sequence
  Description of Artificial Sequence: Synthetic oligonucleotide
gcagtcctcaacaaagaagac

SEQ ID NO: 29445 - DNA, 21 bp, Artificial Sequence
  Description of Artificial Sequence: Synthetic oligonucleotide
gcagtcctcaacagcgcagac

SEQ ID NO: 29446 - DNA, 21 bp, Artificial Sequence
  Description of Artificial Sequence: Synthetic oligonucleotide
gcagtcctcgtcccacacgca

SEQ ID NO: 29447 - DNA, 21 bp, Artificial Sequence
  Description of Artificial Sequence: Synthetic oligonucleotide
gcagtcctcgtcagagaagac

SEQ ID NO: 29448 - DNA, 21 bp, Artificial Sequence
  Description of Artificial Sequence: Synthetic oligonucleotide
gcagtcatgggaagaagcgaa

SEQ ID NO: 29449 - DNA, 21 bp, Artificial Sequence
  Description of Artificial Sequence: Synthetic oligonucleotide
gcagtcatgccaagaacacca

SEQ ID NO: 29450 - DNA, 21 bp, Artificial Sequence
  Description of Artificial Sequence: Synthetic oligonucleotide
gcagtcatgagaatcgcacca

SEQ ID NO: 29451 - DNA, 21 bp, Artificial Sequence
  Description of Artificial Sequence: Synthetic oligonucleotide
gcagtcaacgcagcacaagca

SEQ ID NO: 29452 - DNA, 21 bp, Artificial Sequence
  Description of Artificial Sequence: Synthetic oligonucleotide
gcagtcaacttcgacgtcatc

SEQ ID NO: 29453 - DNA, 21 bp, Artificial Sequence
  Description of Artificial Sequence: Synthetic oligonucleotide
gcagtcaacccaccagaactc

SEQ ID NO: 29454 - DNA, 21 bp, Artificial Sequence
  Description of Artificial Sequence: Synthetic oligonucleotide
gcagtcaacagagtcccactc

SEQ ID NO: 29455 - DNA, 21 bp, Artificial Sequence
  Description of Artificial Sequence: Synthetic oligonucleotide
gcagtcccaggaccaaaaagc

SEQ ID NO: 29456 - DNA, 21 bp, Artificial Sequence
  Description of Artificial Sequence: Synthetic oligonucleotide
gcagtcccactcctcctcaca

SEQ ID NO: 29457 - DNA, 21 bp, Artificial Sequence
  Description of Artificial Sequence: Synthetic oligonucleotide
gcagtcccaatgagattccca

SEQ ID NO: 29458 - DNA, 21 bp, Artificial Sequence
  Description of Artificial Sequence: Synthetic oligonucleotide
gcagtcccaagccacgcacaa

SEQ ID NO: 29459 - DNA, 21 bp, Artificial Sequence
  Description of Artificial Sequence: Synthetic oligonucleotide
gcagtcccagtcagccacgca

SEQ ID NO: 29460 - DNA, 21 bp, Artificial Sequence
  Description of Artificial Sequence: Synthetic oligonucleotide
gcagtccaaacacacggattc

SEQ ID NO: 29461 - DNA, 21 bp, Artificial Sequence
  Description of Artificial Sequence: Synthetic oligonucleotide
gcagtccaaacaacagaccac

SEQ ID NO: 29462 - DNA, 21 bp, Artificial Sequence
  Description of Artificial Sequence: Synthetic oligonucleotide
gcagtcagagcaagccaacaa

SEQ ID NO: 29463 - DNA, 21 bp, Artificial Sequence
  Description of Artificial Sequence: Synthetic oligonucleotide
gcagtcagagcaagcacacca

SEQ ID NO: 29464 - DNA, 21 bp, Artificial Sequence
  Description of Artificial Sequence: Synthetic oligonucleotide
gcagtcagagacagcgtcctc

SEQ ID NO: 29465 - DNA, 21 bp, Artificial Sequence
  Description of Artificial Sequence: Synthetic oligonucleotide
gcagtcagacaccaaggagac

SEQ ID NO: 29466 - DNA, 21 bp, Artificial Sequence
  Description of Artificial Sequence: Synthetic oligonucleotide
gcagtcagactcaaaatggaa

SEQ ID NO: 29467 - DNA, 21 bp, Artificial Sequence
  Description of Artificial Sequence: Synthetic oligonucleotide
gcagtcagaccaccaccacca

SEQ ID NO: 29468 - DNA, 21 bp, Artificial Sequence
  Description of Artificial Sequence: Synthetic oligonucleotide
gcagtcagaagagacgacgca

SEQ ID NO: 29469 - DNA, 21 bp, Artificial Sequence
  Description of Artificial Sequence: Synthetic oligonucleotide
gcagtcagaagcctcacagtc

SEQ ID NO: 29470 - DNA, 21 bp, Artificial Sequence
  Description of Artificial Sequence: Synthetic oligonucleotide
gcagtcagaacaaacccactc

SEQ ID NO: 29471 - DNA, 21 bp, Artificial Sequence
  Description of Artificial Sequence: Synthetic oligonucleotide
gcagtcagcggacacagcctc

SEQ ID NO: 29472 - DNA, 21 bp, Artificial Sequence
  Description of Artificial Sequence: Synthetic oligonucleotide
gcagtcagccacgcaagcgac

SEQ ID NO: 29473 - DNA, 21 bp, Artificial Sequence
  Description of Artificial Sequence: Synthetic oligonucleotide
gcagtcagcccatacagcctc

SEQ ID NO: 29474 - DNA, 21 bp, Artificial Sequence
  Description of Artificial Sequence: Synthetic oligonucleotide
gcagtcagcagagcaggagga

SEQ ID NO: 29475 - DNA, 21 bp, Artificial Sequence
  Description of Artificial Sequence: Synthetic oligonucleotide
gcagtcagcagaccaaacagc

SEQ ID NO: 29476 - DNA, 21 bp, Artificial Sequence
  Description of Artificial Sequence: Synthetic oligonucleotide
gcagtcacaaacagcatgatc

SEQ ID NO: 29477 - DNA, 21 bp, Artificial Sequence
  Description of Artificial Sequence: Synthetic oligonucleotide
gcagtcacaccactcccactc

SEQ ID NO: 29478 - DNA, 21 bp, Artificial Sequence
  Description of Artificial Sequence: Synthetic oligonucleotide
gcagtcacaagcggattcaga

SEQ ID NO: 29479 - DNA, 21 bp, Artificial Sequence
  Description of Artificial Sequence: Synthetic oligonucleotide
gcagtcacagtcaacgcatac

SEQ ID NO: 29480 - DNA, 21 bp, Artificial Sequence
  Description of Artificial Sequence: Synthetic oligonucleotide
gcagtcgtcggagcaatcctc

SEQ ID NO: 29481 - DNA, 21 bp, Artificial Sequence
  Description of Artificial Sequence: Synthetic oligonucleotide
gcagtcgtcagaaaccaaagc

SEQ ID NO: 29482 - DNA, 21 bp, Artificial Sequence
  Description of Artificial Sequence: Synthetic oligonucleotide
gcagtctacaacgacgtctgc

SEQ ID NO: 29483 - DNA, 21 bp, Artificial Sequence
  Description of Artificial Sequence: Synthetic oligonucleotide
gcagtctacagcagcgaacca

SEQ ID NO: 29484 - DNA, 21 bp, Artificial Sequence
  Description of Artificial Sequence: Synthetic oligonucleotide
gcatggaacccaaacgaaaaa

SEQ ID NO: 29485 - DNA, 21 bp, Artificial Sequence
  Description of Artificial Sequence: Synthetic oligonucleotide
gcatggccaaacagcctcaaa

SEQ ID NO: 29486 - DNA, 21 bp, Artificial Sequence
  Description of Artificial Sequence: Synthetic oligonucleotide
gcatggacacaacaaggacca

SEQ ID NO: 29487 - DNA, 21 bp, Artificial Sequence
  Description of Artificial Sequence: Synthetic oligonucleotide
gcatacgcaatcctcgaagca

SEQ ID NO: 29488 - DNA, 21 bp, Artificial Sequence
  Description of Artificial Sequence: Synthetic oligonucleotide
gcatacgcaaaagcaatcgca

SEQ ID NO: 29489 - DNA, 21 bp, Artificial Sequence
  Description of Artificial Sequence: Synthetic oligonucleotide
gcatacgacaaaagcctcgtc

SEQ ID NO: 29490 - DNA, 21 bp, Artificial Sequence
  Description of Artificial Sequence: Synthetic oligonucleotide
gcatacgacagagcattcagc

SEQ ID NO: 29491 - DNA, 21 bp, Artificial Sequence
  Description of Artificial Sequence: Synthetic oligonucleotide
gcatacgacagcgcaccatac

SEQ ID NO: 29492 - DNA, 21 bp, Artificial Sequence
  Description of Artificial Sequence: Synthetic oligonucleotide
gcatacgacagcagagcagca

SEQ ID NO: 29493 - DNA, 21 bp, Artificial Sequence
  Description of Artificial Sequence: Synthetic oligonucleotide
gcatacgaagcaagaacacac

SEQ ID NO: 29494 - DNA, 21 bp, Artificial Sequence
  Description of Artificial Sequence: Synthetic oligonucleotide
gcatacgaaggaacactcagc

SEQ ID NO: 29495 - DNA, 21 bp, Artificial Sequence
  Description of Artificial Sequence: Synthetic oligonucleotide
gcatacgaaccaatcagcaaa

SEQ ID NO: 29496 - DNA, 21 bp, Artificial Sequence
  Description of Artificial Sequence: Synthetic oligonucleotide
gcatacttcgaagtccaacca

SEQ ID NO: 29497 - DNA, 21 bp, Artificial Sequence
  Description of Artificial Sequence: Synthetic oligonucleotide
gcatacggaggaccaagcgca

SEQ ID NO: 29498 - DNA, 21 bp, Artificial Sequence
  Description of Artificial Sequence: Synthetic oligonucleotide
gcatacggagtcacagaaaaa

SEQ ID NO: 29499 - DNA, 21 bp, Artificial Sequence
  Description of Artificial Sequence: Synthetic oligonucleotide
gcataccacgaaaaaggagca

SEQ ID NO: 29500 - DNA, 21 bp, Artificial Sequence
  Description of Artificial Sequence: Synthetic oligonucleotide
gcataccacagagcagacgca

SEQ ID NO: 29501 - DNA, 21 bp, Artificial Sequence
  Description of Artificial Sequence: Synthetic oligonucleotide
gcataccacgtcagagtcgac

SEQ ID NO: 29502 - DNA, 21 bp, Artificial Sequence
  Description of Artificial Sequence: Synthetic oligonucleotide
gcatacatccaaggaagcctc

SEQ ID NO: 29503 - DNA, 21 bp, Artificial Sequence
  Description of Artificial Sequence: Synthetic oligonucleotide
gcatacaaacaacaaatgagc

SEQ ID NO: 29504 - DNA, 21 bp, Artificial Sequence
  Description of Artificial Sequence: Synthetic oligonucleotide
gcatacatgccaagcgcatac

SEQ ID NO: 29505 - DNA, 21 bp, Artificial Sequence
  Description of Artificial Sequence: Synthetic oligonucleotide
gcatacaacggaacaagacca

SEQ ID NO: 29506 - DNA, 21 bp, Artificial Sequence
  Description of Artificial Sequence: Synthetic oligonucleotide
gcatacaaccaaccaggagca

SEQ ID NO: 29507 - DNA, 21 bp, Artificial Sequence
  Description of Artificial Sequence: Synthetic oligonucleotide
gcatacaacacaacaaaacaa

SEQ ID NO: 29508 - DNA, 21 bp, Artificial Sequence
  Description of Artificial Sequence: Synthetic oligonucleotide
gcatacccattcaaagaacac

SEQ ID NO: 29509 - DNA, 21 bp, Artificial Sequence
  Description of Artificial Sequence: Synthetic oligonucleotide
gcatacccaagagaaagcgga

SEQ ID NO: 29510 - DNA, 21 bp, Artificial Sequence
  Description of Artificial Sequence: Synthetic oligonucleotide
gcatacccaagcaacgcaagc

SEQ ID NO: 29511 - DNA, 21 bp, Artificial Sequence
  Description of Artificial Sequence: Synthetic oligonucleotide
gcatacccaagcagccaattc

SEQ ID NO: 29512 - DNA, 21 bp, Artificial Sequence
  Description of Artificial Sequence: Synthetic oligonucleotide
gcatacccaacaagcttcgca

SEQ ID NO: 29513 - DNA, 21 bp, Artificial Sequence
  Description of Artificial Sequence: Synthetic oligonucleotide
gcatacagagcaagcagcgaa

SEQ ID NO: 29514 - DNA, 21 bp, Artificial Sequence
  Description of Artificial Sequence: Synthetic oligonucleotide
gcatacagagacagcacaaca

SEQ ID NO: 29515 - DNA, 21 bp, Artificial Sequence
  Description of Artificial Sequence: Synthetic oligonucleotide
gcatacagaggaagcacaaca

SEQ ID NO: 29516 - DNA, 21 bp, Artificial Sequence
  Description of Artificial Sequence: Synthetic oligonucleotide
gcatacagcgacagccaaaga

SEQ ID NO: 29517 - DNA, 21 bp, Artificial Sequence
  Description of Artificial Sequence: Synthetic oligonucleotide
gcatacagcaaaagcgcagac

SEQ ID NO: 29518 - DNA, 21 bp, Artificial Sequence
  Description of Artificial Sequence: Synthetic oligonucleotide
gcatacagcaacagaacaatg

SEQ ID NO: 29519 - DNA, 21 bp, Artificial Sequence
  Description of Artificial Sequence: Synthetic oligonucleotide
gcatacagcccaacaagaaac

SEQ ID NO: 29520 - DNA, 21 bp, Artificial Sequence
  Description of Artificial Sequence: Synthetic oligonucleotide
gcatacgtcggaacaacacca

SEQ ID NO: 29521 - DNA, 21 bp, Artificial Sequence
  Description of Artificial Sequence: Synthetic oligonucleotide
gcatacgtcaacacaccacca

SEQ ID NO: 29522 - DNA, 21 bp, Artificial Sequence
  Description of Artificial Sequence: Synthetic oligonucleotide
gcatacgtcacaccaagcagc

SEQ ID NO: 29523 - DNA, 21 bp, Artificial Sequence
  Description of Artificial Sequence: Synthetic oligonucleotide
tgcgcagcaagaagcacagca

SEQ ID NO: 29524 - DNA, 21 bp, Artificial Sequence
  Description of Artificial Sequence: Synthetic oligonucleotide
tgcgcagcaagccaaagcgaa

SEQ ID NO: 29525 - DNA, 21 bp, Artificial Sequence
  Description of Artificial Sequence: Synthetic oligonucleotide
tgcgcaaaaacaacagcaaac

SEQ ID NO: 29526 - DNA, 21 bp, Artificial Sequence
  Description of Artificial Sequence: Synthetic oligonucleotide
tgcgcactcggagcaagctac

SEQ ID NO: 29527 - DNA, 21 bp, Artificial Sequence
  Description of Artificial Sequence: Synthetic oligonucleotide
tgcgcaccactcagaccactc

SEQ ID NO: 29528 - DNA, 21 bp, Artificial Sequence
  Description of Artificial Sequence: Synthetic oligonucleotide
tgcgcaagagacacacaccca

SEQ ID NO: 29529 - DNA, 21 bp, Artificial Sequence
  Description of Artificial Sequence: Synthetic oligonucleotide
tgcgcaagaatgaaagaagtc

SEQ ID NO: 29530 - DNA, 21 bp, Artificial Sequence
  Description of Artificial Sequence: Synthetic oligonucleotide
tgcgcaagaagcttcgaagtc

SEQ ID NO: 29531 - DNA, 21 bp, Artificial Sequence
  Description of Artificial Sequence: Synthetic oligonucleotide
tgcgcagtcttccaaacagga

SEQ ID NO: 29532 - DNA, 21 bp, Artificial Sequence
  Description of Artificial Sequence: Synthetic oligonucleotide
tgcgcagtcggagtcagaagc

SEQ ID NO: 29533 - DNA, 21 bp, Artificial Sequence
  Description of Artificial Sequence: Synthetic oligonucleotide
tgctgcgcaccaggactcagc

SEQ ID NO: 29534 - DNA, 21 bp, Artificial Sequence
  Description of Artificial Sequence: Synthetic oligonucleotide
tgcgacgcactcaacctcgca

SEQ ID NO: 29535 - DNA, 21 bp, Artificial Sequence
  Description of Artificial Sequence: Synthetic oligonucleotide
tgcgacagcagcaacagcagc

SEQ ID NO: 29536 - DNA, 21 bp, Artificial Sequence
  Description of Artificial Sequence: Synthetic oligonucleotide
tgcgaagcaagcagcaaagtc

SEQ ID NO: 29537 - DNA, 21 bp, Artificial Sequence
  Description of Artificial Sequence: Synthetic oligonucleotide
tgcgaaaaactcgtcagagtc

SEQ ID NO: 29538 - DNA, 21 bp, Artificial Sequence
  Description of Artificial Sequence: Synthetic oligonucleotide
tgcgaaatggaagcaacactc

SEQ ID NO: 29539 - DNA, 21 bp, Artificial Sequence
  Description of Artificial Sequence: Synthetic oligonucleotide
tgcgaaccatgccaagaactc

SEQ ID NO: 29540 - DNA, 21 bp, Artificial Sequence
  Description of Artificial Sequence: Synthetic oligonucleotide
tgcgaaccatacgaaagaagc

SEQ ID NO: 29541 - DNA, 21 bp, Artificial Sequence
  Description of Artificial Sequence: Synthetic oligonucleotide
tgcgaaacaatcacactcgca

SEQ ID NO: 29542 - DNA, 21 bp, Artificial Sequence
  Description of Artificial Sequence: Synthetic oligonucleotide
tgcgaaacatggcaaatgcac

SEQ ID NO: 29543 - DNA, 21 bp, Artificial Sequence
  Description of Artificial Sequence: Synthetic oligonucleotide
tgcgaagtcgaaaaaaaagaa

SEQ ID NO: 29544 - DNA, 21 bp, Artificial Sequence
  Description of Artificial Sequence: Synthetic oligonucleotide
tgcgaagtcggagcaccaagc

SEQ ID NO: 29545 - DNA, 21 bp, Artificial Sequence
  Description of Artificial Sequence: Synthetic oligonucleotide
tgcttcccaaaaacagtcagc

SEQ ID NO: 29546 - DNA, 21 bp, Artificial Sequence
  Description of Artificial Sequence: Synthetic oligonucleotide
tgcttcacaagcgaaagagga

SEQ ID NO: 29547 - DNA, 21 bp, Artificial Sequence
  Description of Artificial Sequence: Synthetic oligonucleotide
tgcggactcgtcatctgcgac

SEQ ID NO: 29548 - DNA, 21 bp, Artificial Sequence
  Description of Artificial Sequence: Synthetic oligonucleotide
tgcggaatgagacaaagcagc

SEQ ID NO: 29549 - DNA, 21 bp, Artificial Sequence
  Description of Artificial Sequence: Synthetic oligonucleotide
tgcggaaaccacgaagcaagc

SEQ ID NO: 29550 - DNA, 21 bp, Artificial Sequence
  Description of Artificial Sequence: Synthetic oligonucleotide
tgcggaagcttcatcacacac

SEQ ID NO: 29551 - DNA, 21 bp, Artificial Sequence
  Description of Artificial Sequence: Synthetic oligonucleotide
tgccacccaaaaatggaattc

SEQ ID NO: 29552 - DNA, 21 bp, Artificial Sequence
  Description of Artificial Sequence: Synthetic oligonucleotide
tgccacacagcaagctgcagc

SEQ ID NO: 29553 - DNA, 21 bp, Artificial Sequence
  Description of Artificial Sequence: Synthetic oligonucleotide
tgcatcgcaagaccagaatgc

SEQ ID NO: 29554 - DNA, 21 bp, Artificial Sequence
  Description of Artificial Sequence: Synthetic oligonucleotide
tgcatccaaagcagcctccac

SEQ ID NO: 29555 - DNA, 21 bp, Artificial Sequence
  Description of Artificial Sequence: Synthetic oligonucleotide
tgcatcgtcgtcgaaacagtc

SEQ ID NO: 29556 - DNA, 21 bp, Artificial Sequence
  Description of Artificial Sequence: Synthetic oligonucleotide
tgcaaagaagtcccaagagca

SEQ ID NO: 29557 - DNA, 21 bp, Artificial Sequence
  Description of Artificial Sequence: Synthetic oligonucleotide
tgcaaaggaacacacaactac

SEQ ID NO: 29558 - DNA, 21 bp, Artificial Sequence
  Description of Artificial Sequence: Synthetic oligonucleotide
tgcaaacacggaacaccaatg

SEQ ID NO: 29559 - DNA, 21 bp, Artificial Sequence
  Description of Artificial Sequence: Synthetic oligonucleotide
tgcaaaagcaacagcacatgc

SEQ ID NO: 29560 - DNA, 21 bp, Artificial Sequence
  Description of Artificial Sequence: Synthetic oligonucleotide
tgcaaaagcagcatcggaagc

SEQ ID NO: 29561 - DNA, 21 bp, Artificial Sequence
  Description of Artificial Sequence: Synthetic oligonucleotide
tgcctcgaagactgcatgaga

SEQ ID NO: 29562 - DNA, 21 bp, Artificial Sequence
  Description of Artificial Sequence: Synthetic oligonucleotide
tgcctcgaaatcccaatcagc

SEQ ID NO: 29563 - DNA, 21 bp, Artificial Sequence
  Description of Artificial Sequence: Synthetic oligonucleotide
tgcctcgaaagcgacagacca

SEQ ID NO: 29564 - DNA, 21 bp, Artificial Sequence
  Description of Artificial Sequence: Synthetic oligonucleotide
tgcctcggaacacacatgctc

SEQ ID NO: 29565 - DNA, 21 bp, Artificial Sequence
  Description of Artificial Sequence: Synthetic oligonucleotide
tgcctcccagcagacagcgaa

SEQ ID NO: 29566 - DNA, 21 bp, Artificial Sequence
  Description of Artificial Sequence: Synthetic oligonucleotide
tgcctccaaacaggactcaca

SEQ ID NO: 29567 - DNA, 21 bp, Artificial Sequence
  Description of Artificial Sequence: Synthetic oligonucleotide
tgcctcagaacaagcgtccca

SEQ ID NO: 29568 - DNA, 21 bp, Artificial Sequence
  Description of Artificial Sequence: Synthetic oligonucleotide
tgcctcagcagcggaagcgtc

SEQ ID NO: 29569 - DNA, 21 bp, Artificial Sequence
  Description of Artificial Sequence: Synthetic oligonucleotide
tgcatggcagaactcatggac

SEQ ID NO: 29570 - DNA, 21 bp, Artificial Sequence
  Description of Artificial Sequence: Synthetic oligonucleotide
tgcatggcagaactcagagac

SEQ ID NO: 29571 - DNA, 21 bp, Artificial Sequence
  Description of Artificial Sequence: Synthetic oligonucleotide
tgcatgccaagaacatgcgaa

SEQ ID NO: 29572 - DNA, 21 bp, Artificial Sequence
  Description of Artificial Sequence: Synthetic oligonucleotide
tgcatgacaatcccaaacgca

SEQ ID NO: 29573 - DNA, 21 bp, Artificial Sequence
  Description of Artificial Sequence: Synthetic oligonucleotide
tgcaacgcaagctgcggaaga

SEQ ID NO: 29574 - DNA, 21 bp, Artificial Sequence
  Description of Artificial Sequence: Synthetic oligonucleotide
tgcaacgaaatcacagaacca

SEQ ID NO: 29575 - DNA, 21 bp, Artificial Sequence
  Description of Artificial Sequence: Synthetic oligonucleotide
tgcaacccaaaaacaagcagc

SEQ ID NO: 29576 - DNA, 21 bp, Artificial Sequence
  Description of Artificial Sequence: Synthetic oligonucleotide
tgcaacagcagcagctgcaca

SEQ ID NO: 29577 - DNA, 21 bp, Artificial Sequence
  Description of Artificial Sequence: Synthetic oligonucleotide
tgcccagcagaaaaccaactc

SEQ ID NO: 29578 - DNA, 21 bp, Artificial Sequence
  Description of Artificial Sequence: Synthetic oligonucleotide
tgcccagcaaaaagctgcgga

SEQ ID NO: 29579 - DNA, 21 bp, Artificial Sequence
  Description of Artificial Sequence: Synthetic oligonucleotide
tgcccagacagataccaatgc

SEQ ID NO: 29580 - DNA, 21 bp, Artificial Sequence
  Description of Artificial Sequence: Synthetic oligonucleotide
tgcccactcgcaccatacagc

SEQ ID NO: 29581 - DNA, 21 bp, Artificial Sequence
  Description of Artificial Sequence: Synthetic oligonucleotide
tgcccactcgacagcacaatc

SEQ ID NO: 29582 - DNA, 21 bp, Artificial Sequence
  Description of Artificial Sequence: Synthetic oligonucleotide
tgcccactcggagacagacac

SEQ ID NO: 29583 - DNA, 21 bp, Artificial Sequence
  Description of Artificial Sequence: Synthetic oligonucleotide
tgcccaatggtctgcagcgca

SEQ ID NO: 29584 - DNA, 21 bp, Artificial Sequence
  Description of Artificial Sequence: Synthetic oligonucleotide
tgcccaccacaaccactccca

SEQ ID NO: 29585 - DNA, 21 bp, Artificial Sequence
  Description of Artificial Sequence: Synthetic oligonucleotide
tgcccaagaacaggactcaac

SEQ ID NO: 29586 - DNA, 21 bp, Artificial Sequence
  Description of Artificial Sequence: Synthetic oligonucleotide
tgcccaagcgaaagaatggga

SEQ ID NO: 29587 - DNA, 21 bp, Artificial Sequence
  Description of Artificial Sequence: Synthetic oligonucleotide
tgcccaagcatcctccactgc

SEQ ID NO: 29588 - DNA, 21 bp, Artificial Sequence
  Description of Artificial Sequence: Synthetic oligonucleotide
tgcccaagcagagcaccatgc

SEQ ID NO: 29589 - DNA, 21 bp, Artificial Sequence
  Description of Artificial Sequence: Synthetic oligonucleotide
tgcccaacaccaagcagctgc

SEQ ID NO: 29590 - DNA, 21 bp, Artificial Sequence
  Description of Artificial Sequence: Synthetic oligonucleotide
tgcccaacaacaaaaagcgca

SEQ ID NO: 29591 - DNA, 21 bp, Artificial Sequence
  Description of Artificial Sequence: Synthetic oligonucleotide
tgccaagcaagaagctgcatc

SEQ ID NO: 29592 - DNA, 21 bp, Artificial Sequence
  Description of Artificial Sequence: Synthetic oligonucleotide
tgcagagcaagcagcagccca

SEQ ID NO: 29593 - DNA, 21 bp, Artificial Sequence
  Description of Artificial Sequence: Synthetic oligonucleotide
tgcagagcagtcgaaagacca

SEQ ID NO: 29594 - DNA, 21 bp, Artificial Sequence
  Description of Artificial Sequence: Synthetic oligonucleotide
tgcagaatgatgaacagacca

SEQ ID NO: 29595 - DNA, 21 bp, Artificial Sequence
  Description of Artificial Sequence: Synthetic oligonucleotide
tgcagaatgaacgacctcgtc

SEQ ID NO: 29596 - DNA, 21 bp, Artificial Sequence
  Description of Artificial Sequence: Synthetic oligonucleotide
tgcagaagaacaatggacatg

SEQ ID NO: 29597 - DNA, 21 bp, Artificial Sequence
  Description of Artificial Sequence: Synthetic oligonucleotide
tgcagaagcgaaaacaaactc

SEQ ID NO: 29598 - DNA, 21 bp, Artificial Sequence
  Description of Artificial Sequence: Synthetic oligonucleotide
tgcagaagcggaggagaagca

SEQ ID NO: 29599 - DNA, 21 bp, Artificial Sequence
  Description of Artificial Sequence: Synthetic oligonucleotide
tgcagcgcactccacaaatgc

SEQ ID NO: 29600 - DNA, 21 bp, Artificial Sequence
  Description of Artificial Sequence: Synthetic oligonucleotide
tgcagcgcaaacttcacagga

SEQ ID NO: 29601 - DNA, 21 bp, Artificial Sequence
  Description of Artificial Sequence: Synthetic oligonucleotide
tgcagcgaaagcctcatggca

SEQ ID NO: 29602 - DNA, 21 bp, Artificial Sequence
  Description of Artificial Sequence: Synthetic oligonucleotide
tgcagcgaaagcagcatcttc

SEQ ID NO: 29603 - DNA, 21 bp, Artificial Sequence
  Description of Artificial Sequence: Synthetic oligonucleotide
tgcagcggaacaacaaactgc

SEQ ID NO: 29604 - DNA, 21 bp, Artificial Sequence
  Description of Artificial Sequence: Synthetic oligonucleotide
tgcagcccaccacacttccca

SEQ ID NO: 29605 - DNA, 21 bp, Artificial Sequence
  Description of Artificial Sequence: Synthetic oligonucleotide
tgcagcccaagcggagtcatc

SEQ ID NO: 29606 - DNA, 21 bp, Artificial Sequence
  Description of Artificial Sequence: Synthetic oligonucleotide
tgcagcagcagaccattcgca

SEQ ID NO: 29607 - DNA, 21 bp, Artificial Sequence
  Description of Artificial Sequence: Synthetic oligonucleotide
tgcagcagcacaacaaaatgc

SEQ ID NO: 29608 - DNA, 21 bp, Artificial Sequence
  Description of Artificial Sequence: Synthetic oligonucleotide
tgcacagcagaactcccattc

SEQ ID NO: 29609 - DNA, 21 bp, Artificial Sequence
  Description of Artificial Sequence: Synthetic oligonucleotide
tgcacagaccacccagcatgc

SEQ ID NO: 29610 - DNA, 21 bp, Artificial Sequence
  Description of Artificial Sequence: Synthetic oligonucleotide
tgcacagacagcacatgcctc

SEQ ID NO: 29611 - DNA, 21 bp, Artificial Sequence
  Description of Artificial Sequence: Synthetic oligonucleotide
tgcacaggaccactctgcagc

SEQ ID NO: 29612 - DNA, 21 bp, Artificial Sequence
  Description of Artificial Sequence: Synthetic oligonucleotide
tgcacaaaaagcatctgcaca

SEQ ID NO: 29613 - DNA, 21 bp, Artificial Sequence
  Description of Artificial Sequence: Synthetic oligonucleotide
tgcacaagcacaaaaatctac

SEQ ID NO: 29614 - DNA, 21 bp, Artificial Sequence
  Description of Artificial Sequence: Synthetic oligonucleotide
tgcacaacagacgcactcagc

SEQ ID NO: 29615 - DNA, 21 bp, Artificial Sequence
  Description of Artificial Sequence: Synthetic oligonucleotide
tgcacatacacactcatcgac

SEQ ID NO: 29616 - DNA, 21 bp, Artificial Sequence
  Description of Artificial Sequence: Synthetic oligonucleotide
tgcgtcccagacagcagcaaa

SEQ ID NO: 29617 - DNA, 21 bp, Artificial Sequence
  Description of Artificial Sequence: Synthetic oligonucleotide
tgcgtcagactcacaacacca

SEQ ID NO: 29618 - DNA, 21 bp, Artificial Sequence
  Description of Artificial Sequence: Synthetic oligonucleotide
tgcgtcacaccagaaaaagtc

SEQ ID NO: 29619 - DNA, 21 bp, Artificial Sequence
  Description of Artificial Sequence: Synthetic oligonucleotide
tgcgtcgtcaaccaacaagga

SEQ ID NO: 29620 - DNA, 21 bp, Artificial Sequence
  Description of Artificial Sequence: Synthetic oligonucleotide
tgcgtcgtcagcagacaagac

SEQ ID NO: 29621 - DNA, 21 bp, Artificial Sequence
  Description of Artificial Sequence: Synthetic oligonucleotide
tgctacatcggaacacaatgc

SEQ ID NO: 29622 - DNA, 21 bp, Artificial Sequence
  Description of Artificial Sequence: Synthetic oligonucleotide
tgctacctcagcacatgcaca

SEQ ID NO: 29623 - DNA, 21 bp, Artificial Sequence
  Description of Artificial Sequence: Synthetic oligonucleotide
tgctacaacagaacagaatgc

SEQ ID NO: 29624 - DNA, 21 bp, Artificial Sequence
  Description of Artificial Sequence: Synthetic oligonucleotide
tgctacccaccagaaaacgca

SEQ ID NO: 29625 - DNA, 21 bp, Artificial Sequence
  Description of Artificial Sequence: Synthetic oligonucleotide
gacgcagcaggaacaagcaaa

SEQ ID NO: 29626 - DNA, 21 bp, Artificial Sequence
  Description of Artificial Sequence: Synthetic oligonucleotide
gacgcagcaaaaagcgcatac

SEQ ID NO: 29627 - DNA, 21 bp, Artificial Sequence
  Description of Artificial Sequence: Synthetic oligonucleotide
gacgcagcaacaaaagcaaca

SEQ ID NO: 29628 - DNA, 21 bp, Artificial Sequence
  Description of Artificial Sequence: Synthetic oligonucleotide
gacgcagaaagagcaaaacca

SEQ ID NO: 29629 - DNA, 21 bp, Artificial Sequence
  Description of Artificial Sequence: Synthetic oligonucleotide
gacgcagaatggccaatgtac

SEQ ID NO: 29630 - DNA, 21 bp, Artificial Sequence
  Description of Artificial Sequence: Synthetic oligonucleotide
gacgcaggaatcggaggacca

SEQ ID NO: 29631 - DNA, 21 bp, Artificial Sequence
  Description of Artificial Sequence: Synthetic oligonucleotide
gacgcaggaaactggcaacca

SEQ ID NO: 29632 - DNA, 21 bp, Artificial Sequence
  Description of Artificial Sequence: Synthetic oligonucleotide
gacgcaggaccaagagcacaa

SEQ ID NO: 29633 - DNA, 21 bp, Artificial Sequence
  Description of Artificial Sequence: Synthetic oligonucleotide
gacgcacacaacgcaccaaga

SEQ ID NO: 29634 - DNA, 21 bp, Artificial Sequence
  Description of Artificial Sequence: Synthetic oligonucleotide
gacgcacacagactcgtcaca

SEQ ID NO: 29635 - DNA, 21 bp, Artificial Sequence
  Description of Artificial Sequence: Synthetic oligonucleotide
gacgcaatcaaagcaatgagc

SEQ ID NO: 29636 - DNA, 21 bp, Artificial Sequence
  Description of Artificial Sequence: Synthetic oligonucleotide
gacgcaatcaacatgggagga

SEQ ID NO: 29637 - DNA, 21 bp, Artificial Sequence
  Description of Artificial Sequence: Synthetic oligonucleotide
gacgcaatcccactcgcaagc

SEQ ID NO: 29638 - DNA, 21 bp, Artificial Sequence
  Description of Artificial Sequence: Synthetic oligonucleotide
gacgcaaaagtcatggtccca

SEQ ID NO: 29639 - DNA, 21 bp, Artificial Sequence
  Description of Artificial Sequence: Synthetic oligonucleotide
gacgcactcaaaggagcaaaa

SEQ ID NO: 29640 - DNA, 21 bp, Artificial Sequence
  Description of Artificial Sequence: Synthetic oligonucleotide
gacgcaccaaacagcgtcatg

SEQ ID NO: 29641 - DNA, 21 bp, Artificial Sequence
  Description of Artificial Sequence: Synthetic oligonucleotide
gacgcaccaccactcagaaca

SEQ ID NO: 29642 - DNA, 21 bp, Artificial Sequence
  Description of Artificial Sequence: Synthetic oligonucleotide
gacgcaccaagagaaagcctc

SEQ ID NO: 29643 - DNA, 21 bp, Artificial Sequence
  Description of Artificial Sequence: Synthetic oligonucleotide
gacgcaccaagaaacgcagaa

SEQ ID NO: 29644 - DNA, 21 bp, Artificial Sequence
  Description of Artificial Sequence: Synthetic oligonucleotide
gacgcacaaccaagccaaatg

SEQ ID NO: 29645 - DNA, 21 bp, Artificial Sequence
  Description of Artificial Sequence: Synthetic oligonucleotide
gacgcacaatacagccaaaga

SEQ ID NO: 29646 - DNA, 21 bp, Artificial Sequence
  Description of Artificial Sequence: Synthetic oligonucleotide
gacgcaagagcacacccactc

SEQ ID NO: 29647 - DNA, 21 bp, Artificial Sequence
  Description of Artificial Sequence: Synthetic oligonucleotide
gacgcaagattcagcatgcaa

SEQ ID NO: 29648 - DNA, 21 bp, Artificial Sequence
  Description of Artificial Sequence: Synthetic oligonucleotide
gacgcaagactcgcaccagaa

SEQ ID NO: 29649 - DNA, 21 bp, Artificial Sequence
  Description of Artificial Sequence: Synthetic oligonucleotide
gacgcaagaatgctcatcagc

SEQ ID NO: 29650 - DNA, 21 bp, Artificial Sequence
  Description of Artificial Sequence: Synthetic oligonucleotide
gacgcaagaagagacatcgtc

SEQ ID NO: 29651 - DNA, 21 bp, Artificial Sequence
  Description of Artificial Sequence: Synthetic oligonucleotide
gacgcaagaacagcaacattc

SEQ ID NO: 29652 - DNA, 21 bp, Artificial Sequence
  Description of Artificial Sequence: Synthetic oligonucleotide
gacgcaagagtcacaagattc

SEQ ID NO: 29653 - DNA, 21 bp, Artificial Sequence
  Description of Artificial Sequence: Synthetic oligonucleotide
gacgcaagcctcatgaaaatg

SEQ ID NO: 29654 - DNA, 21 bp, Artificial Sequence
  Description of Artificial Sequence: Synthetic oligonucleotide
gacgcaagcccaaacagagaa

SEQ ID NO: 29655 - DNA, 21 bp, Artificial Sequence
  Description of Artificial Sequence: Synthetic oligonucleotide
gacgcaagcacaatcaaagac

SEQ ID NO: 29656 - DNA, 21 bp, Artificial Sequence
  Description of Artificial Sequence: Synthetic oligonucleotide
gacgcagtcgcagacgaccca

SEQ ID NO: 29657 - DNA, 21 bp, Artificial Sequence
  Description of Artificial Sequence: Synthetic oligonucleotide
gacgcagtcgaaagagtcagc

SEQ ID NO: 29658 - DNA, 21 bp, Artificial Sequence
  Description of Artificial Sequence: Synthetic oligonucleotide
gacgcagtcgtcgaaagaagc

SEQ ID NO: 29659 - DNA, 21 bp, Artificial Sequence
  Description of Artificial Sequence: Synthetic oligonucleotide
gactgcgacacacaaaaaaca

SEQ ID NO: 29660 - DNA, 21 bp, Artificial Sequence
  Description of Artificial Sequence: Synthetic oligonucleotide
gactgcctcctcagcggacca

SEQ ID NO: 29661 - DNA, 21 bp, Artificial Sequence
  Description of Artificial Sequence: Synthetic oligonucleotide
gactgcccattccaaaaagga

SEQ ID NO: 29662 - DNA, 21 bp, Artificial Sequence
  Description of Artificial Sequence: Synthetic oligonucleotide
gactgcagcttcaaatgcagc

SEQ ID NO: 29663 - DNA, 21 bp, Artificial Sequence
  Description of Artificial Sequence: Synthetic oligonucleotide
gacgacgaacacagaagcaca

SEQ ID NO: 29664 - DNA, 21 bp, Artificial Sequence
  Description of Artificial Sequence: Synthetic oligonucleotide
gacgacggacacccacacctc

SEQ ID NO: 29665 - DNA, 21 bp, Artificial Sequence
  Description of Artificial Sequence: Synthetic oligonucleotide
gacgacatcgcatgcgacgca

SEQ ID NO: 29666 - DNA, 21 bp, Artificial Sequence
  Description of Artificial Sequence: Synthetic oligonucleotide
gacgacaaagaaagaagagaa

SEQ ID NO: 29667 - DNA, 21 bp, Artificial Sequence
  Description of Artificial Sequence: Synthetic oligonucleotide
gacgacatggcaagaggaaga

SEQ ID NO: 29668 - DNA, 21 bp, Artificial Sequence
  Description of Artificial Sequence: Synthetic oligonucleotide
gacgacccacacagcagcagc

SEQ ID NO: 29669 - DNA, 21 bp, Artificial Sequence
  Description of Artificial Sequence: Synthetic oligonucleotide
gacgacccaagagacggaaga

SEQ ID NO: 29670 - DNA, 21 bp, Artificial Sequence
  Description of Artificial Sequence: Synthetic oligonucleotide
gacgacagaagacacttcgtc

SEQ ID NO: 29671 - DNA, 21 bp, Artificial Sequence
  Description of Artificial Sequence: Synthetic oligonucleotide
gacgacagaagcttcccaatg

SEQ ID NO: 29672 - DNA, 21 bp, Artificial Sequence
  Description of Artificial Sequence: Synthetic oligonucleotide
gacgacagcctctgccaactc

SEQ ID NO: 29673 - DNA, 21 bp, Artificial Sequence
  Description of Artificial Sequence: Synthetic oligonucleotide
gacgacacaagattcgacgac

SEQ ID NO: 29674 - DNA, 21 bp, Artificial Sequence
  Description of Artificial Sequence: Synthetic oligonucleotide
gacgactggccaaaagtcagc

SEQ ID NO: 29675 - DNA, 21 bp, Artificial Sequence
  Description of Artificial Sequence: Synthetic oligonucleotide
gacgactaccacgcaccagca

SEQ ID NO: 29676 - DNA, 21 bp, Artificial Sequence
  Description of Artificial Sequence: Synthetic oligonucleotide
gacgaagcaaaaaaacaccac

SEQ ID NO: 29677 - DNA, 21 bp, Artificial Sequence
  Description of Artificial Sequence: Synthetic oligonucleotide
gacgaagcaccacacccagca

SEQ ID NO: 29678 - DNA, 21 bp, Artificial Sequence
  Description of Artificial Sequence: Synthetic oligonucleotide
gacgaagacatcaaaagactc

SEQ ID NO: 29679 - DNA, 21 bp, Artificial Sequence
  Description of Artificial Sequence: Synthetic oligonucleotide
gacgaaggaaaagtcaaaaga

SEQ ID NO: 29680 - DNA, 21 bp, Artificial Sequence
  Description of Artificial Sequence: Synthetic oligonucleotide
gacgaaggaagacaccaaaga

SEQ ID NO: 29681 - DNA, 21 bp, Artificial Sequence
  Description of Artificial Sequence: Synthetic oligonucleotide
gacgaaaacgaaacaggacca

SEQ ID NO: 29682 - DNA, 21 bp, Artificial Sequence
  Description of Artificial Sequence: Synthetic oligonucleotide
gacgaaaacgtcgcactccca

SEQ ID NO: 29683 - DNA, 21 bp, Artificial Sequence
  Description of Artificial Sequence: Synthetic oligonucleotide
gacgaaccattcaaaaaagca

SEQ ID NO: 29684 - DNA, 21 bp, Artificial Sequence
  Description of Artificial Sequence: Synthetic oligonucleotide
gacgaaccaggaatgacaagc

SEQ ID NO: 29685 - DNA, 21 bp, Artificial Sequence
  Description of Artificial Sequence: Synthetic oligonucleotide
gacgaaccaagacaccaaatg

SEQ ID NO: 29686 - DNA, 21 bp, Artificial Sequence
  Description of Artificial Sequence: Synthetic oligonucleotide
gacgaaagaggattcagaagc

SEQ ID NO: 29687 - DNA, 21 bp, Artificial Sequence
  Description of Artificial Sequence: Synthetic oligonucleotide
gacgaaagaagactcgaccca

SEQ ID NO: 29688 - DNA, 21 bp, Artificial Sequence
  Description of Artificial Sequence: Synthetic oligonucleotide
gacgaaagcacaatgagcaga

SEQ ID NO: 29689 - DNA, 21 bp, Artificial Sequence
  Description of Artificial Sequence: Synthetic oligonucleotide
gacgaaagctacgacagaaac

SEQ ID NO: 29690 - DNA, 21 bp, Artificial Sequence
  Description of Artificial Sequence: Synthetic oligonucleotide
gacgaagtcaaaaaagaagga

SEQ ID NO: 29691 - DNA, 21 bp, Artificial Sequence
  Description of Artificial Sequence: Synthetic oligonucleotide
gacgaatgggcacacgcaaga

SEQ ID NO: 29692 - DNA, 21 bp, Artificial Sequence
  Description of Artificial Sequence: Synthetic oligonucleotide
gacttcgcaggaaacagcgac

SEQ ID NO: 29693 - DNA, 21 bp, Artificial Sequence
  Description of Artificial Sequence: Synthetic oligonucleotide
gacttcgcactcgcaagccca

SEQ ID NO: 29694 - DNA, 21 bp, Artificial Sequence
  Description of Artificial Sequence: Synthetic oligonucleotide
gacttcgcaagacaacacgac

SEQ ID NO: 29695 - DNA, 21 bp, Artificial Sequence
  Description of Artificial Sequence: Synthetic oligonucleotide
gacttcgaatgcatcggagtc

SEQ ID NO: 29696 - DNA, 21 bp, Artificial Sequence
  Description of Artificial Sequence: Synthetic oligonucleotide
gacttcgaaaacccaatggaa

SEQ ID NO: 29697 - DNA, 21 bp, Artificial Sequence
  Description of Artificial Sequence: Synthetic oligonucleotide
gacttcggaggactcgcagtc

SEQ ID NO: 29698 - DNA, 21 bp, Artificial Sequence
  Description of Artificial Sequence: Synthetic oligonucleotide
gacttcaaagcagtctgctgc

SEQ ID NO: 29699 - DNA, 21 bp, Artificial Sequence
  Description of Artificial Sequence: Synthetic oligonucleotide
gacttcaaagtcgtcagcgga

SEQ ID NO: 29700 - DNA, 21 bp, Artificial Sequence
  Description of Artificial Sequence: Synthetic oligonucleotide
gacttcccactcaaaccagga

SEQ ID NO: 29701 - DNA, 21 bp, Artificial Sequence
  Description of Artificial Sequence: Synthetic oligonucleotide
gacttcagaaaaccagaacaa

SEQ ID NO: 29702 - DNA, 21 bp, Artificial Sequence
  Description of Artificial Sequence: Synthetic oligonucleotide
gacttcagcctcggactcctc

SEQ ID NO: 29703 - DNA, 21 bp, Artificial Sequence
  Description of Artificial Sequence: Synthetic oligonucleotide
gacttcagcctcaacaacagc

SEQ ID NO: 29704 - DNA, 21 bp, Artificial Sequence
  Description of Artificial Sequence: Synthetic oligonucleotide
gacttcagcctccaagacgca

SEQ ID NO: 29705 - DNA, 21 bp, Artificial Sequence
  Description of Artificial Sequence: Synthetic oligonucleotide
gacttcagcagaagagcagac

SEQ ID NO: 29706 - DNA, 21 bp, Artificial Sequence
  Description of Artificial Sequence: Synthetic oligonucleotide
gacttcacaagagcagacgga

SEQ ID NO: 29707 - DNA, 21 bp, Artificial Sequence
  Description of Artificial Sequence: Synthetic oligonucleotide
gacttcacagtcccagcagga

SEQ ID NO: 29708 - DNA, 21 bp, Artificial Sequence
  Description of Artificial Sequence: Synthetic oligonucleotide
gacttcgtcccactcaaaagc

SEQ ID NO: 29709 - DNA, 21 bp, Artificial Sequence
  Description of Artificial Sequence: Synthetic oligonucleotide
gacttcgtcacaatcccaaac

SEQ ID NO: 29710 - DNA, 21 bp, Artificial Sequence
  Description of Artificial Sequence: Synthetic oligonucleotide
gacggagcaagcggagtccca

SEQ ID NO: 29711 - DNA, 21 bp, Artificial Sequence
  Description of Artificial Sequence: Synthetic oligonucleotide
gacggaggacacagcgtcaga

SEQ ID NO: 29712 - DNA, 21 bp, Artificial Sequence
  Description of Artificial Sequence: Synthetic oligonucleotide
gacggaatcagagacccaaga

SEQ ID NO: 29713 - DNA, 21 bp, Artificial Sequence
  Description of Artificial Sequence: Synthetic oligonucleotide
gacggaaaagcaaaagtcagc

SEQ ID NO: 29714 - DNA, 21 bp, Artificial Sequence
  Description of Artificial Sequence: Synthetic oligonucleotide
gacggaaaacacacagactac

SEQ ID NO: 29715 - DNA, 21 bp, Artificial Sequence
  Description of Artificial Sequence: Synthetic oligonucleotide
gacggactcagaacagaaagc

SEQ ID NO: 29716 - DNA, 21 bp, Artificial Sequence
  Description of Artificial Sequence: Synthetic oligonucleotide
gacggactcagcagactccca

SEQ ID NO: 29717 - DNA, 21 bp, Artificial Sequence
  Description of Artificial Sequence: Synthetic oligonucleotide
gacggaatgctcagagacaga

SEQ ID NO: 29718 - DNA, 21 bp, Artificial Sequence
  Description of Artificial Sequence: Synthetic oligonucleotide
gacggaaacagctaccaccca

SEQ ID NO: 29719 - DNA, 21 bp, Artificial Sequence
  Description of Artificial Sequence: Synthetic oligonucleotide
gacggaaacacagcaagagga

SEQ ID NO: 29720 - DNA, 21 bp, Artificial Sequence
  Description of Artificial Sequence: Synthetic oligonucleotide
gacggaccagaagaagaaaga

SEQ ID NO: 29721 - DNA, 21 bp, Artificial Sequence
  Description of Artificial Sequence: Synthetic oligonucleotide
gacggaccaggaagcccaaac

SEQ ID NO: 29722 - DNA, 21 bp, Artificial Sequence
  Description of Artificial Sequence: Synthetic oligonucleotide
gacggaagacacctcagccca

SEQ ID NO: 29723 - DNA, 21 bp, Artificial Sequence
  Description of Artificial Sequence: Synthetic oligonucleotide
gacggaagaacagtcgcagca

SEQ ID NO: 29724 - DNA, 21 bp, Artificial Sequence
  Description of Artificial Sequence: Synthetic oligonucleotide
gacggaagcttcgaaccatac

SEQ ID NO: 29725 - DNA, 21 bp, Artificial Sequence
  Description of Artificial Sequence: Synthetic oligonucleotide
gacggaagcggaacactcaac

SEQ ID NO: 29726 - DNA, 21 bp, Artificial Sequence
  Description of Artificial Sequence: Synthetic oligonucleotide
gacggaagcccaagctgggca

SEQ ID NO: 29727 - DNA, 21 bp, Artificial Sequence
  Description of Artificial Sequence: Synthetic oligonucleotide
gacggaacagaccaaagccaa

SEQ ID NO: 29728 - DNA, 21 bp, Artificial Sequence
  Description of Artificial Sequence: Synthetic oligonucleotide
gacggaacaagagcacaatgg

SEQ ID NO: 29729 - DNA, 21 bp, Artificial Sequence
  Description of Artificial Sequence: Synthetic oligonucleotide
gacggaacaagcctcaaacac

SEQ ID NO: 29730 - DNA, 21 bp, Artificial Sequence
  Description of Artificial Sequence: Synthetic oligonucleotide
gacggaacatacagaaacatg

SEQ ID NO: 29731 - DNA, 21 bp, Artificial Sequence
  Description of Artificial Sequence: Synthetic oligonucleotide
gacggagtcacaacactcagc

SEQ ID NO: 29732 - DNA, 21 bp, Artificial Sequence
  Description of Artificial Sequence: Synthetic oligonucleotide
gaccacgcacacagaagcaca

SEQ ID NO: 29733 - DNA, 21 bp, Artificial Sequence
  Description of Artificial Sequence: Synthetic oligonucleotide
gaccacaaaagcaacagcaga

SEQ ID NO: 29734 - DNA, 21 bp, Artificial Sequence
  Description of Artificial Sequence: Synthetic oligonucleotide
gaccacctcgcacaagaatgc

SEQ ID NO: 29735 - DNA, 21 bp, Artificial Sequence
  Description of Artificial Sequence: Synthetic oligonucleotide
gaccacctcgacgtcaacgca

SEQ ID NO: 29736 - DNA, 21 bp, Artificial Sequence
  Description of Artificial Sequence: Synthetic oligonucleotide
gaccacaaccacatgggaagc

SEQ ID NO: 29737 - DNA, 21 bp, Artificial Sequence
  Description of Artificial Sequence: Synthetic oligonucleotide
gaccacaacctcagacaaaac

SEQ ID NO: 29738 - DNA, 21 bp, Artificial Sequence
  Description of Artificial Sequence: Synthetic oligonucleotide
gaccacccatacctcagccca

SEQ ID NO: 29739 - DNA, 21 bp, Artificial Sequence
  Description of Artificial Sequence: Synthetic oligonucleotide
gaccacagaacactcgaaagc

SEQ ID NO: 29740 - DNA, 21 bp, Artificial Sequence
  Description of Artificial Sequence: Synthetic oligonucleotide
gaccacagcgcactcagcagc

SEQ ID NO: 29741 - DNA, 21 bp, Artificial Sequence
  Description of Artificial Sequence: Synthetic oligonucleotide
gaccacagcggaaaaaaagac

SEQ ID NO: 29742 - DNA, 21 bp, Artificial Sequence
  Description of Artificial Sequence: Synthetic oligonucleotide
gaccacagcatggcactcaga

SEQ ID NO: 29743 - DNA, 21 bp, Artificial Sequence
  Description of Artificial Sequence: Synthetic oligonucleotide
gaccacagcgtcccaggaaca

SEQ ID NO: 29744 - DNA, 21 bp, Artificial Sequence
  Description of Artificial Sequence: Synthetic oligonucleotide
gaccacacagacagagacgga

SEQ ID NO: 29745 - DNA, 21 bp, Artificial Sequence
  Description of Artificial Sequence: Synthetic oligonucleotide
gaccacacaccactcctcagc

SEQ ID NO: 29746 - DNA, 21 bp, Artificial Sequence
  Description of Artificial Sequence: Synthetic oligonucleotide
gaccactggaacggagacagc

SEQ ID NO: 29747 - DNA, 21 bp, Artificial Sequence
  Description of Artificial Sequence: Synthetic oligonucleotide
gaccactacgcaagactccca

SEQ ID NO: 29748 - DNA, 21 bp, Artificial Sequence
  Description of Artificial Sequence: Synthetic oligonucleotide
gacatcgcacacccaagaaac

SEQ ID NO: 29749 - DNA, 21 bp, Artificial Sequence
  Description of Artificial Sequence: Synthetic oligonucleotide
gacatcgcacaacacgaaaca

SEQ ID NO: 29750 - DNA, 21 bp, Artificial Sequence
  Description of Artificial Sequence: Synthetic oligonucleotide
gacatcgaagacacaccagtc

SEQ ID NO: 29751 - DNA, 21 bp, Artificial Sequence
  Description of Artificial Sequence: Synthetic oligonucleotide
gacatccacagaagcagctac

SEQ ID NO: 29752 - DNA, 21 bp, Artificial Sequence
  Description of Artificial Sequence: Synthetic oligonucleotide
gacatccacagccacctctac

SEQ ID NO: 29753 - DNA, 21 bp, Artificial Sequence
  Description of Artificial Sequence: Synthetic oligonucleotide
gacatcaacttcaaagcacca

SEQ ID NO: 29754 - DNA, 21 bp, Artificial Sequence
  Description of Artificial Sequence: Synthetic oligonucleotide
gacatcaacccaacaacactc

SEQ ID NO: 29755 - DNA, 21 bp, Artificial Sequence
  Description of Artificial Sequence: Synthetic oligonucleotide
gacatcccagtcgcaagcaaa

SEQ ID NO: 29756 - DNA, 21 bp, Artificial Sequence
  Description of Artificial Sequence: Synthetic oligonucleotide
gacatcccagtcacaagcgca

SEQ ID NO: 29757 - DNA, 21 bp, Artificial Sequence
  Description of Artificial Sequence: Synthetic oligonucleotide
gacatcagacacagactcagc

SEQ ID NO: 29758 - DNA, 21 bp, Artificial Sequence
  Description of Artificial Sequence: Synthetic oligonucleotide
gacatcagaagaccaacacca

SEQ ID NO: 29759 - DNA, 21 bp, Artificial Sequence
  Description of Artificial Sequence: Synthetic oligonucleotide
gacatcagaacaggaagcgtc

SEQ ID NO: 29760 - DNA, 21 bp, Artificial Sequence
  Description of Artificial Sequence: Synthetic oligonucleotide
gacatcagcctcccagaagca

SEQ ID NO: 29761 - DNA, 21 bp, Artificial Sequence
  Description of Artificial Sequence: Synthetic oligonucleotide
gacatcagcaacgaccaatac

SEQ ID NO: 29762 - DNA, 21 bp, Artificial Sequence
  Description of Artificial Sequence: Synthetic oligonucleotide
gacatcagcagaccagtcaga

SEQ ID NO: 29763 - DNA, 21 bp, Artificial Sequence
  Description of Artificial Sequence: Synthetic oligonucleotide
gacatcagcagacaaaacagc

SEQ ID NO: 29764 - DNA, 21 bp, Artificial Sequence
  Description of Artificial Sequence: Synthetic oligonucleotide
gacatcacagcaacaacagca

SEQ ID NO: 29765 - DNA, 21 bp, Artificial Sequence
  Description of Artificial Sequence: Synthetic oligonucleotide
gacatcacaggaagagtccca

SEQ ID NO: 29766 - DNA, 21 bp, Artificial Sequence
  Description of Artificial Sequence: Synthetic oligonucleotide
gacaaagcagtcggaatgatc

SEQ ID NO: 29767 - DNA, 21 bp, Artificial Sequence
  Description of Artificial Sequence: Synthetic oligonucleotide
gacaaagacgaactcatgatg

SEQ ID NO: 29768 - DNA, 21 bp, Artificial Sequence
  Description of Artificial Sequence: Synthetic oligonucleotide
gacaaagaagtcccaccaatg

SEQ ID NO: 29769 - DNA, 21 bp, Artificial Sequence
  Description of Artificial Sequence: Synthetic oligonucleotide
gacaaagaatacgcaggactc

SEQ ID NO: 29770 - DNA, 21 bp, Artificial Sequence
  Description of Artificial Sequence: Synthetic oligonucleotide
gacaaaggaaaagcaagccca

SEQ ID NO: 29771 - DNA, 21 bp, Artificial Sequence
  Description of Artificial Sequence: Synthetic oligonucleotide
gacaaaggaagcctcacaatg

SEQ ID NO: 29772 - DNA, 21 bp, Artificial Sequence
  Description of Artificial Sequence: Synthetic oligonucleotide
gacaaaatcccaaacttcagc

SEQ ID NO: 29773 - DNA, 21 bp, Artificial Sequence
  Description of Artificial Sequence: Synthetic oligonucleotide
gacaaactccacggacaagca

SEQ ID NO: 29774 - DNA, 21 bp, Artificial Sequence
  Description of Artificial Sequence: Synthetic oligonucleotide
gacaaactcccaggagacaga

SEQ ID NO: 29775 - DNA, 21 bp, Artificial Sequence
  Description of Artificial Sequence: Synthetic oligonucleotide
gacaaactcagagcaaacaac

SEQ ID NO: 29776 - DNA, 21 bp, Artificial Sequence
  Description of Artificial Sequence: Synthetic oligonucleotide
gacaaactcacaccaagactc

SEQ ID NO: 29777 - DNA, 21 bp, Artificial Sequence
  Description of Artificial Sequence: Synthetic oligonucleotide
gacaaaatgaacatgccacca

SEQ ID NO: 29778 - DNA, 21 bp, Artificial Sequence
  Description of Artificial Sequence: Synthetic oligonucleotide
gacaaaagagacggaagactc

SEQ ID NO: 29779 - DNA, 21 bp, Artificial Sequence
  Description of Artificial Sequence: Synthetic oligonucleotide
gacaaaagaagcggaacatgc

SEQ ID NO: 29780 - DNA, 21 bp, Artificial Sequence
  Description of Artificial Sequence: Synthetic oligonucleotide
gacaaaagcatcgcaacaaac

SEQ ID NO: 29781 - DNA, 21 bp, Artificial Sequence
  Description of Artificial Sequence: Synthetic oligonucleotide
gacaaaagcccaatgatgaga

SEQ ID NO: 29782 - DNA, 21 bp, Artificial Sequence
  Description of Artificial Sequence: Synthetic oligonucleotide
gacaaaagcagactctacgca

SEQ ID NO: 29783 - DNA, 21 bp, Artificial Sequence
  Description of Artificial Sequence: Synthetic oligonucleotide
gacaaaagcagaaaccaaatg

SEQ ID NO: 29784 - DNA, 21 bp, Artificial Sequence
  Description of Artificial Sequence: Synthetic oligonucleotide
gacaaaacagcagtcatcagc

SEQ ID NO: 29785 - DNA, 21 bp, Artificial Sequence
  Description of Artificial Sequence: Synthetic oligonucleotide
gacctcgcactcagcagagga

SEQ ID NO: 29786 - DNA, 21 bp, Artificial Sequence
  Description of Artificial Sequence: Synthetic oligonucleotide
gacctcgcaagcgtcccaaga

SEQ ID NO: 29787 - DNA, 21 bp, Artificial Sequence
  Description of Artificial Sequence: Synthetic oligonucleotide
gacctcgacccaatctgcaca

SEQ ID NO: 29788 - DNA, 21 bp, Artificial Sequence
  Description of Artificial Sequence: Synthetic oligonucleotide
gacctcgacagcccacacagc

SEQ ID NO: 29789 - DNA, 21 bp, Artificial Sequence
  Description of Artificial Sequence: Synthetic oligonucleotide
gacctcgaacaccaatgccca

SEQ ID NO: 29790 - DNA, 21 bp, Artificial Sequence
  Description of Artificial Sequence: Synthetic oligonucleotide
gacctcttcaaaatcgaaaga

SEQ ID NO: 29791 - DNA, 21 bp, Artificial Sequence
  Description of Artificial Sequence: Synthetic oligonucleotide
gacctcggaggactcgtccac

SEQ ID NO: 29792 - DNA, 21 bp, Artificial Sequence
  Description of Artificial Sequence: Synthetic oligonucleotide
gacctcggaccagacaaagga

SEQ ID NO: 29793 - DNA, 21 bp, Artificial Sequence
  Description of Artificial Sequence: Synthetic oligonucleotide
gacctccacggagcaatgaga

SEQ ID NO: 29794 - DNA, 21 bp, Artificial Sequence
  Description of Artificial Sequence: Synthetic oligonucleotide
gacctccacatccaagaccca

SEQ ID NO: 29795 - DNA, 21 bp, Artificial Sequence
  Description of Artificial Sequence: Synthetic oligonucleotide
gacctcatcgaaaacagagaa

SEQ ID NO: 29796 - DNA, 21 bp, Artificial Sequence
  Description of Artificial Sequence: Synthetic oligonucleotide
gacctcatcgaaagaggaagc

SEQ ID NO: 29797 - DNA, 21 bp, Artificial Sequence
  Description of Artificial Sequence: Synthetic oligonucleotide
gacctcatcccaagcagacca

SEQ ID NO: 29798 - DNA, 21 bp, Artificial Sequence
  Description of Artificial Sequence: Synthetic oligonucleotide
gacctcatcgtcagaggactc

SEQ ID NO: 29799 - DNA, 21 bp, Artificial Sequence
  Description of Artificial Sequence: Synthetic oligonucleotide
gacctcaaaggaggaggattc

SEQ ID NO: 29800 - DNA, 21 bp, Artificial Sequence
  Description of Artificial Sequence: Synthetic oligonucleotide
gacctcaaaaaaccagacttc

SEQ ID NO: 29801 - DNA, 21 bp, Artificial Sequence
  Description of Artificial Sequence: Synthetic oligonucleotide
gacctcaaactccacggacca

SEQ ID NO: 29802 - DNA, 21 bp, Artificial Sequence
  Description of Artificial Sequence: Synthetic oligonucleotide
gacctcaaaccaagcctcctc

SEQ ID NO: 29803 - DNA, 21 bp, Artificial Sequence
  Description of Artificial Sequence: Synthetic oligonucleotide
gacctcaaaagcagcgaaaga

SEQ ID NO: 29804 - DNA, 21 bp, Artificial Sequence
  Description of Artificial Sequence: Synthetic oligonucleotide
gacctcctcgaaagaccaagc

SEQ ID NO: 29805 - DNA, 21 bp, Artificial Sequence
  Description of Artificial Sequence: Synthetic oligonucleotide
gacctcctcgaaacaagactc

SEQ ID NO: 29806 - DNA, 21 bp, Artificial Sequence
  Description of Artificial Sequence: Synthetic oligonucleotide
gacctcctcacagcactcgca

SEQ ID NO: 29807 - DNA, 21 bp, Artificial Sequence
  Description of Artificial Sequence: Synthetic oligonucleotide
gacctcatgcacacagacgca

SEQ ID NO: 29808 - DNA, 21 bp, Artificial Sequence
  Description of Artificial Sequence: Synthetic oligonucleotide
gacctcatgcacgtcagcgga

SEQ ID NO: 29809 - DNA, 21 bp, Artificial Sequence
  Description of Artificial Sequence: Synthetic oligonucleotide
gacctcatgatccacggactc

SEQ ID NO: 29810 - DNA, 21 bp, Artificial Sequence
  Description of Artificial Sequence: Synthetic oligonucleotide
gacctcaacagaggaccaaga

SEQ ID NO: 29811 - DNA, 21 bp, Artificial Sequence
  Description of Artificial Sequence: Synthetic oligonucleotide
gacctcaacagaatcgaatgc

SEQ ID NO: 29812 - DNA, 21 bp, Artificial Sequence
  Description of Artificial Sequence: Synthetic oligonucleotide
gacctcaacacaacacaacac

SEQ ID NO: 29813 - DNA, 21 bp, Artificial Sequence
  Description of Artificial Sequence: Synthetic oligonucleotide
gacctcccagcagtcagccac

SEQ ID NO: 29814 - DNA, 21 bp, Artificial Sequence
  Description of Artificial Sequence: Synthetic oligonucleotide
gacctcccactcggaaacagc

SEQ ID NO: 29815 - DNA, 21 bp, Artificial Sequence
  Description of Artificial Sequence: Synthetic oligonucleotide
gacctcccactcagaacaaca

SEQ ID NO: 29816 - DNA, 21 bp, Artificial Sequence
  Description of Artificial Sequence: Synthetic oligonucleotide
gacctcccactcacaagcctc

SEQ ID NO: 29817 - DNA, 21 bp, Artificial Sequence
  Description of Artificial Sequence: Synthetic oligonucleotide
gacctcccaagacaaagcgtc

SEQ ID NO: 29818 - DNA, 21 bp, Artificial Sequence
  Description of Artificial Sequence: Synthetic oligonucleotide
gacctcccatacagccaccca

SEQ ID NO: 29819 - DNA, 21 bp, Artificial Sequence
  Description of Artificial Sequence: Synthetic oligonucleotide
gacctccaaacaggaccacaa

SEQ ID NO: 29820 - DNA, 21 bp, Artificial Sequence
  Description of Artificial Sequence: Synthetic oligonucleotide
gacctcagatgcgcagaagga

SEQ ID NO: 29821 - DNA, 21 bp, Artificial Sequence
  Description of Artificial Sequence: Synthetic oligonucleotide
gacctcagagaagcaccaaga

SEQ ID NO: 29822 - DNA, 21 bp, Artificial Sequence
  Description of Artificial Sequence: Synthetic oligonucleotide
gacctcagacacgcaagcagc

SEQ ID NO: 29823 - DNA, 21 bp, Artificial Sequence
  Description of Artificial Sequence: Synthetic oligonucleotide
gacctcagacacccaccaagc

SEQ ID NO: 29824 - DNA, 21 bp, Artificial Sequence
  Description of Artificial Sequence: Synthetic oligonucleotide
gacctcagaccaggaggactc

SEQ ID NO: 29825 - DNA, 21 bp, Artificial Sequence
  Description of Artificial Sequence: Synthetic oligonucleotide
gacctcagaagaagcatgctc

SEQ ID NO: 29826 - DNA, 21 bp, Artificial Sequence
  Description of Artificial Sequence: Synthetic oligonucleotide
gacctcagaagaacaccattc

SEQ ID NO: 29827 - DNA, 21 bp, Artificial Sequence
  Description of Artificial Sequence: Synthetic oligonucleotide
gacctcagcgcactcagagga

SEQ ID NO: 29828 - DNA, 21 bp, Artificial Sequence
  Description of Artificial Sequence: Synthetic oligonucleotide
gacctcagcggactcacaaga

SEQ ID NO: 29829 - DNA, 21 bp, Artificial Sequence
  Description of Artificial Sequence: Synthetic oligonucleotide
gacctcacacacgtcggaagc

SEQ ID NO: 29830 - DNA, 21 bp, Artificial Sequence
  Description of Artificial Sequence: Synthetic oligonucleotide
gacctcacaagatggccaagc

SEQ ID NO: 29831 - DNA, 21 bp, Artificial Sequence
  Description of Artificial Sequence: Synthetic oligonucleotide
gacctcacaacagcaccaaca

SEQ ID NO: 29832 - DNA, 21 bp, Artificial Sequence
  Description of Artificial Sequence: Synthetic oligonucleotide
gacctcacagtcagctacgca

SEQ ID NO: 29833 - DNA, 21 bp, Artificial Sequence
  Description of Artificial Sequence: Synthetic oligonucleotide
gacctcgtcgaaacagcaagc

SEQ ID NO: 29834 - DNA, 21 bp, Artificial Sequence
  Description of Artificial Sequence: Synthetic oligonucleotide
gacctcgtcatcccaacaaga

SEQ ID NO: 29835 - DNA, 21 bp, Artificial Sequence
  Description of Artificial Sequence: Synthetic oligonucleotide
gacatggacatgcaaatggca

SEQ ID NO: 29836 - DNA, 21 bp, Artificial Sequence
  Description of Artificial Sequence: Synthetic oligonucleotide
gacatgggagcaagacaatac

SEQ ID NO: 29837 - DNA, 21 bp, Artificial Sequence
  Description of Artificial Sequence: Synthetic oligonucleotide
gacatgaaaccagcagtcagc

SEQ ID NO: 29838 - DNA, 21 bp, Artificial Sequence
  Description of Artificial Sequence: Synthetic oligonucleotide
gacatgctcaaaaaattcaac

SEQ ID NO: 29839 - DNA, 21 bp, Artificial Sequence
  Description of Artificial Sequence: Synthetic oligonucleotide
gacatgccattcggaccactc

SEQ ID NO: 29840 - DNA, 21 bp, Artificial Sequence
  Description of Artificial Sequence: Synthetic oligonucleotide
gacatgagcgcaagaccaagc

SEQ ID NO: 29841 - DNA, 21 bp, Artificial Sequence
  Description of Artificial Sequence: Synthetic oligonucleotide
gacatgagcacaagaggaatg

SEQ ID NO: 29842 - DNA, 21 bp, Artificial Sequence
  Description of Artificial Sequence: Synthetic oligonucleotide
gacatgacaacaggagcagtc

SEQ ID NO: 29843 - DNA, 21 bp, Artificial Sequence
  Description of Artificial Sequence: Synthetic oligonucleotide
gacatggtcgtcccaagcgac

SEQ ID NO: 29844 - DNA, 21 bp, Artificial Sequence
  Description of Artificial Sequence: Synthetic oligonucleotide
gacatgtacccaacaaacaga

SEQ ID NO: 29845 - DNA, 21 bp, Artificial Sequence
  Description of Artificial Sequence: Synthetic oligonucleotide
gacaacgcaagcaaactcatg

SEQ ID NO: 29846 - DNA, 21 bp, Artificial Sequence
  Description of Artificial Sequence: Synthetic oligonucleotide
gacaacgaactcctcatgagc

SEQ ID NO: 29847 - DNA, 21 bp, Artificial Sequence
  Description of Artificial Sequence: Synthetic oligonucleotide
gacaacgaaagcatcccaaca

SEQ ID NO: 29848 - DNA, 21 bp, Artificial Sequence
  Description of Artificial Sequence: Synthetic oligonucleotide
gacaacggaagcgcagacaac

SEQ ID NO: 29849 - DNA, 21 bp, Artificial Sequence
  Description of Artificial Sequence: Synthetic oligonucleotide
gacaacctcgacggactctgc

SEQ ID NO: 29850 - DNA, 21 bp, Artificial Sequence
  Description of Artificial Sequence: Synthetic oligonucleotide
gacaacctcctcggaagcaga

SEQ ID NO: 29851 - DNA, 21 bp, Artificial Sequence
  Description of Artificial Sequence: Synthetic oligonucleotide
gacaacctcccaacactcgca

SEQ ID NO: 29852 - DNA, 21 bp, Artificial Sequence
  Description of Artificial Sequence: Synthetic oligonucleotide
gacaacctcagaccaagacca

SEQ ID NO: 29853 - DNA, 21 bp, Artificial Sequence
  Description of Artificial Sequence: Synthetic oligonucleotide
gacaacctcagccacagaatg

SEQ ID NO: 29854 - DNA, 21 bp, Artificial Sequence
  Description of Artificial Sequence: Synthetic oligonucleotide
gacaacccagcaatggacaga

SEQ ID NO: 29855 - DNA, 21 bp, Artificial Sequence
  Description of Artificial Sequence: Synthetic oligonucleotide
gacaacccaccaacaggagtc

SEQ ID NO: 29856 - DNA, 21 bp, Artificial Sequence
  Description of Artificial Sequence: Synthetic oligonucleotide
gacaaccaagcagcagtccca

SEQ ID NO: 29857 - DNA, 21 bp, Artificial Sequence
  Description of Artificial Sequence: Synthetic oligonucleotide
gacaacagactcaacgtcgtc

SEQ ID NO: 29858 - DNA, 21 bp, Artificial Sequence
  Description of Artificial Sequence: Synthetic oligonucleotide
gacaacagaccaagactcatg

SEQ ID NO: 29859 - DNA, 21 bp, Artificial Sequence
  Description of Artificial Sequence: Synthetic oligonucleotide
gacaacagagtcagcatccca

SEQ ID NO: 29860 - DNA, 21 bp, Artificial Sequence
  Description of Artificial Sequence: Synthetic oligonucleotide
gacaacagcgcattcgcagtc

SEQ ID NO: 29861 - DNA, 21 bp, Artificial Sequence
  Description of Artificial Sequence: Synthetic oligonucleotide
gacaacacaaactgggcaaaa

SEQ ID NO: 29862 - DNA, 21 bp, Artificial Sequence
  Description of Artificial Sequence: Synthetic oligonucleotide
gacaacacaacaagaacagca

SEQ ID NO: 29863 - DNA, 21 bp, Artificial Sequence
  Description of Artificial Sequence: Synthetic oligonucleotide
gacaacgtcggaatcaaaagc

SEQ ID NO: 29864 - DNA, 21 bp, Artificial Sequence
  Description of Artificial Sequence: Synthetic oligonucleotide
gacaactacgacccaagacca

SEQ ID NO: 29865 - DNA, 21 bp, Artificial Sequence
  Description of Artificial Sequence: Synthetic oligonucleotide
gacccagcagcaacactccca

SEQ ID NO: 29866 - DNA, 21 bp, Artificial Sequence
  Description of Artificial Sequence: Synthetic oligonucleotide
gacccagcactccaaagagca

SEQ ID NO: 29867 - DNA, 21 bp, Artificial Sequence
  Description of Artificial Sequence: Synthetic oligonucleotide
gacccagcaccaacactccca

SEQ ID NO: 29868 - DNA, 21 bp, Artificial Sequence
  Description of Artificial Sequence: Synthetic oligonucleotide
gacccatgccacagaagcctc

SEQ ID NO: 29869 - DNA, 21 bp, Artificial Sequence
  Description of Artificial Sequence: Synthetic oligonucleotide
gacccagacccagcaagcaac

SEQ ID NO: 29870 - DNA, 21 bp, Artificial Sequence
  Description of Artificial Sequence: Synthetic oligonucleotide
gacccagacccaagcctcagc

SEQ ID NO: 29871 - DNA, 21 bp, Artificial Sequence
  Description of Artificial Sequence: Synthetic oligonucleotide
gacccagaagtcgacccagac

SEQ ID NO: 29872 - DNA, 21 bp, Artificial Sequence
  Description of Artificial Sequence: Synthetic oligonucleotide
gacccattcacacacaacgga

SEQ ID NO: 29873 - DNA, 21 bp, Artificial Sequence
  Description of Artificial Sequence: Synthetic oligonucleotide
gacccaggacaccaaagaaca

SEQ ID NO: 29874 - DNA, 21 bp, Artificial Sequence
  Description of Artificial Sequence: Synthetic oligonucleotide
gacccaggactcagaacagac

SEQ ID NO: 29875 - DNA, 21 bp, Artificial Sequence
  Description of Artificial Sequence: Synthetic oligonucleotide
gacccaggaatggtcccagga

SEQ ID NO: 29876 - DNA, 21 bp, Artificial Sequence
  Description of Artificial Sequence: Synthetic oligonucleotide
gacccacacggaaaataccca

SEQ ID NO: 29877 - DNA, 21 bp, Artificial Sequence
  Description of Artificial Sequence: Synthetic oligonucleotide
gacccacacctcagcagccca

SEQ ID NO: 29878 - DNA, 21 bp, Artificial Sequence
  Description of Artificial Sequence: Synthetic oligonucleotide
gacccaatcgcagcaccaaca

SEQ ID NO: 29879 - DNA, 21 bp, Artificial Sequence
  Description of Artificial Sequence: Synthetic oligonucleotide
gacccactcgcaccaatggca

SEQ ID NO: 29880 - DNA, 21 bp, Artificial Sequence
  Description of Artificial Sequence: Synthetic oligonucleotide
gacccactctacagcagcaga

SEQ ID NO: 29881 - DNA, 21 bp, Artificial Sequence
  Description of Artificial Sequence: Synthetic oligonucleotide
gacccaatggcaagagtcgga

SEQ ID NO: 29882 - DNA, 21 bp, Artificial Sequence
  Description of Artificial Sequence: Synthetic oligonucleotide
gacccaaacctcaacctcgca

SEQ ID NO: 29883 - DNA, 21 bp, Artificial Sequence
  Description of Artificial Sequence: Synthetic oligonucleotide
gacccaccactcatggcaaac

SEQ ID NO: 29884 - DNA, 21 bp, Artificial Sequence
  Description of Artificial Sequence: Synthetic oligonucleotide
gacccaccatacgcagtcagc

SEQ ID NO: 29885 - DNA, 21 bp, Artificial Sequence
  Description of Artificial Sequence: Synthetic oligonucleotide
gacccaccatacgaccaaaga

SEQ ID NO: 29886 - DNA, 21 bp, Artificial Sequence
  Description of Artificial Sequence: Synthetic oligonucleotide
gacccacaagaaaaccacgca

SEQ ID NO: 29887 - DNA, 21 bp, Artificial Sequence
  Description of Artificial Sequence: Synthetic oligonucleotide
gacccacaaagactcgtcatc

SEQ ID NO: 29888 - DNA, 21 bp, Artificial Sequence
  Description of Artificial Sequence: Synthetic oligonucleotide
gacccaagattcacactccca

SEQ ID NO: 29889 - DNA, 21 bp, Artificial Sequence
  Description of Artificial Sequence: Synthetic oligonucleotide
gacccaagaaaaagcagcgca

SEQ ID NO: 29890 - DNA, 21 bp, Artificial Sequence
  Description of Artificial Sequence: Synthetic oligonucleotide
gacccaagactcccaagctac

SEQ ID NO: 29891 - DNA, 21 bp, Artificial Sequence
  Description of Artificial Sequence: Synthetic oligonucleotide
gacccaagaccactcgcaagc

SEQ ID NO: 29892 - DNA, 21 bp, Artificial Sequence
  Description of Artificial Sequence: Synthetic oligonucleotide
gacccaagaagcgcagtccaa

SEQ ID NO: 29893 - DNA, 21 bp, Artificial Sequence
  Description of Artificial Sequence: Synthetic oligonucleotide
gacccaagaagcagcctcaca

SEQ ID NO: 29894 - DNA, 21 bp, Artificial Sequence
  Description of Artificial Sequence: Synthetic oligonucleotide
gacccaagaacagaaatggtc

SEQ ID NO: 29895 - DNA, 21 bp, Artificial Sequence
  Description of Artificial Sequence: Synthetic oligonucleotide
gacccaagcgacgactacgtc

SEQ ID NO: 29896 - DNA, 21 bp, Artificial Sequence
  Description of Artificial Sequence: Synthetic oligonucleotide
gacccaagcagaagaccaagc

SEQ ID NO: 29897 - DNA, 21 bp, Artificial Sequence
  Description of Artificial Sequence: Synthetic oligonucleotide
gacccaagcagcctcagactc

SEQ ID NO: 29898 - DNA, 21 bp, Artificial Sequence
  Description of Artificial Sequence: Synthetic oligonucleotide
gacccaagctacgaccaacac

SEQ ID NO: 29899 - DNA, 21 bp, Artificial Sequence
  Description of Artificial Sequence: Synthetic oligonucleotide
gacccaacattcagcagcgaa

SEQ ID NO: 29900 - DNA, 21 bp, Artificial Sequence
  Description of Artificial Sequence: Synthetic oligonucleotide
gacccaacacacagaatcgtc

SEQ ID NO: 29901 - DNA, 21 bp, Artificial Sequence
  Description of Artificial Sequence: Synthetic oligonucleotide
gacccaacactccacagacca

SEQ ID NO: 29902 - DNA, 21 bp, Artificial Sequence
  Description of Artificial Sequence: Synthetic oligonucleotide
gacccaacatacagaggagga

SEQ ID NO: 29903 - DNA, 21 bp, Artificial Sequence
  Description of Artificial Sequence: Synthetic oligonucleotide
gacccagtcggaagaagcctc

SEQ ID NO: 29904 - DNA, 21 bp, Artificial Sequence
  Description of Artificial Sequence: Synthetic oligonucleotide
gacccagtcatcagagcagca

SEQ ID NO: 29905 - DNA, 21 bp, Artificial Sequence
  Description of Artificial Sequence: Synthetic oligonucleotide
gacccagtcatgccaagaaga

SEQ ID NO: 29906 - DNA, 21 bp, Artificial Sequence
  Description of Artificial Sequence: Synthetic oligonucleotide
gacccagtcagcagcagagca

SEQ ID NO: 29907 - DNA, 21 bp, Artificial Sequence
  Description of Artificial Sequence: Synthetic oligonucleotide
gaccaagcaatgagcagaaac

SEQ ID NO: 29908 - DNA, 21 bp, Artificial Sequence
  Description of Artificial Sequence: Synthetic oligonucleotide
gaccaagacaaaagcgcaagc

SEQ ID NO: 29909 - DNA, 21 bp, Artificial Sequence
  Description of Artificial Sequence: Synthetic oligonucleotide
gaccaagaccaaggaagagca

SEQ ID NO: 29910 - DNA, 21 bp, Artificial Sequence
  Description of Artificial Sequence: Synthetic oligonucleotide
gaccaattccacccaagacca

SEQ ID NO: 29911 - DNA, 21 bp, Artificial Sequence
  Description of Artificial Sequence: Synthetic oligonucleotide
gaccaactcaacccaagagga

SEQ ID NO: 29912 - DNA, 21 bp, Artificial Sequence
  Description of Artificial Sequence: Synthetic oligonucleotide
gaccaactcagaagcgcaaca

SEQ ID NO: 29913 - DNA, 21 bp, Artificial Sequence
  Description of Artificial Sequence: Synthetic oligonucleotide
gaccaaccagcatacaacgca

SEQ ID NO: 29914 - DNA, 21 bp, Artificial Sequence
  Description of Artificial Sequence: Synthetic oligonucleotide
gaccaacaattcgaaatggga

SEQ ID NO: 29915 - DNA, 21 bp, Artificial Sequence
  Description of Artificial Sequence: Synthetic oligonucleotide
gaccaacaaagcttcacaaga

SEQ ID NO: 29916 - DNA, 21 bp, Artificial Sequence
  Description of Artificial Sequence: Synthetic oligonucleotide
gaccaaagagcaagcagccca

SEQ ID NO: 29917 - DNA, 21 bp, Artificial Sequence
  Description of Artificial Sequence: Synthetic oligonucleotide
gaccaaagactccaaatgatc

SEQ ID NO: 29918 - DNA, 21 bp, Artificial Sequence
  Description of Artificial Sequence: Synthetic oligonucleotide
gaccaaagcggaacagtcagc

SEQ ID NO: 29919 - DNA, 21 bp, Artificial Sequence
  Description of Artificial Sequence: Synthetic oligonucleotide
gaccaaagcccaggaatgaaa

SEQ ID NO: 29920 - DNA, 21 bp, Artificial Sequence
  Description of Artificial Sequence: Synthetic oligonucleotide
gacagagcactcagcatggga

SEQ ID NO: 29921 - DNA, 21 bp, Artificial Sequence
  Description of Artificial Sequence: Synthetic oligonucleotide
gacagagacacaagcagcttc

SEQ ID NO: 29922 - DNA, 21 bp, Artificial Sequence
  Description of Artificial Sequence: Synthetic oligonucleotide
gacagagaaagaccatacagc

SEQ ID NO: 29923 - DNA, 21 bp, Artificial Sequence
  Description of Artificial Sequence: Synthetic oligonucleotide
gacagattcaacagctacgca

SEQ ID NO: 29924 - DNA, 21 bp, Artificial Sequence
  Description of Artificial Sequence: Synthetic oligonucleotide
gacagaggatgcaaagacaca

SEQ ID NO: 29925 - DNA, 21 bp, Artificial Sequence
  Description of Artificial Sequence: Synthetic oligonucleotide
gacagaggaggattcaacgac

SEQ ID NO: 29926 - DNA, 21 bp, Artificial Sequence
  Description of Artificial Sequence: Synthetic oligonucleotide
gacagaggactcagaacagca

SEQ ID NO: 29927 - DNA, 21 bp, Artificial Sequence
  Description of Artificial Sequence: Synthetic oligonucleotide
gacagaggaaacggaccaaga

SEQ ID NO: 29928 - DNA, 21 bp, Artificial Sequence
  Description of Artificial Sequence: Synthetic oligonucleotide
gacagaggaagcgacctcagc

SEQ ID NO: 29929 - DNA, 21 bp, Artificial Sequence
  Description of Artificial Sequence: Synthetic oligonucleotide
gacagaggaagcctcgcaaga

SEQ ID NO: 29930 - DNA, 21 bp, Artificial Sequence
  Description of Artificial Sequence: Synthetic oligonucleotide
gacagaatcgaaacacaacca

SEQ ID NO: 29931 - DNA, 21 bp, Artificial Sequence
  Description of Artificial Sequence: Synthetic oligonucleotide
gacagaatcatgcaagaacac

SEQ ID NO: 29932 - DNA, 21 bp, Artificial Sequence
  Description of Artificial Sequence: Synthetic oligonucleotide
gacagaatccaaacagcacca

SEQ ID NO: 29933 - DNA, 21 bp, Artificial Sequence
  Description of Artificial Sequence: Synthetic oligonucleotide
gacagaaaaaaactcaacgaa

SEQ ID NO: 29934 - DNA, 21 bp, Artificial Sequence
  Description of Artificial Sequence: Synthetic oligonucleotide
gacagaaaactcgtcacacca

SEQ ID NO: 29935 - DNA, 21 bp, Artificial Sequence
  Description of Artificial Sequence: Synthetic oligonucleotide
gacagactcgcaacaatgagc

SEQ ID NO: 29936 - DNA, 21 bp, Artificial Sequence
  Description of Artificial Sequence: Synthetic oligonucleotide
gacagactcaaccaaagagga

SEQ ID NO: 29937 - DNA, 21 bp, Artificial Sequence
  Description of Artificial Sequence: Synthetic oligonucleotide
gacagaatgacaaacgcagtc

SEQ ID NO: 29938 - DNA, 21 bp, Artificial Sequence
  Description of Artificial Sequence: Synthetic oligonucleotide
gacagaaacctcgtcacaaga

SEQ ID NO: 29939 - DNA, 21 bp, Artificial Sequence
  Description of Artificial Sequence: Synthetic oligonucleotide
gacagaaacgtcaaacacgtc

SEQ ID NO: 29940 - DNA, 21 bp, Artificial Sequence
  Description of Artificial Sequence: Synthetic oligonucleotide
gacagaccattcgaagcacca

SEQ ID NO: 29941 - DNA, 21 bp, Artificial Sequence
  Description of Artificial Sequence: Synthetic oligonucleotide
gacagaccaggaggaaaacca

SEQ ID NO: 29942 - DNA, 21 bp, Artificial Sequence
  Description of Artificial Sequence: Synthetic oligonucleotide
gacagaccactccacgtcgtc

SEQ ID NO: 29943 - DNA, 21 bp, Artificial Sequence
  Description of Artificial Sequence: Synthetic oligonucleotide
gacagaccaccatgcagcaga

SEQ ID NO: 29944 - DNA, 21 bp, Artificial Sequence
  Description of Artificial Sequence: Synthetic oligonucleotide
gacagaccaagcagcccactc

SEQ ID NO: 29945 - DNA, 21 bp, Artificial Sequence
  Description of Artificial Sequence: Synthetic oligonucleotide
gacagacaaagaccactcagc

SEQ ID NO: 29946 - DNA, 21 bp, Artificial Sequence
  Description of Artificial Sequence: Synthetic oligonucleotide
gacagacaaacactcacaaga

SEQ ID NO: 29947 - DNA, 21 bp, Artificial Sequence
  Description of Artificial Sequence: Synthetic oligonucleotide
gacagaagaatgggagtcgca

SEQ ID NO: 29948 - DNA, 21 bp, Artificial Sequence
  Description of Artificial Sequence: Synthetic oligonucleotide
gacagaagaccagcacacgac

SEQ ID NO: 29949 - DNA, 21 bp, Artificial Sequence
  Description of Artificial Sequence: Synthetic oligonucleotide
gacagaagaagcgaagaaaga

SEQ ID NO: 29950 - DNA, 21 bp, Artificial Sequence
  Description of Artificial Sequence: Synthetic oligonucleotide
gacagaagcgcagcaatcatc

SEQ ID NO: 29951 - DNA, 21 bp, Artificial Sequence
  Description of Artificial Sequence: Synthetic oligonucleotide
gacagaagcggaccaaacgaa

SEQ ID NO: 29952 - DNA, 21 bp, Artificial Sequence
  Description of Artificial Sequence: Synthetic oligonucleotide
gacagaagcatcgcactcaga

SEQ ID NO: 29953 - DNA, 21 bp, Artificial Sequence
  Description of Artificial Sequence: Synthetic oligonucleotide
gacagaagcctcgcattcgca

SEQ ID NO: 29954 - DNA, 21 bp, Artificial Sequence
  Description of Artificial Sequence: Synthetic oligonucleotide
gacagaagcctcagaagcctc

SEQ ID NO: 29955 - DNA, 21 bp, Artificial Sequence
  Description of Artificial Sequence: Synthetic oligonucleotide
gacagaagcaacgcaggacac

SEQ ID NO: 29956 - DNA, 21 bp, Artificial Sequence
  Description of Artificial Sequence: Synthetic oligonucleotide
gacagaagccaactcacagca

SEQ ID NO: 29957 - DNA, 21 bp, Artificial Sequence
  Description of Artificial Sequence: Synthetic oligonucleotide
gacagaagccaagtcctccac

SEQ ID NO: 29958 - DNA, 21 bp, Artificial Sequence
  Description of Artificial Sequence: Synthetic oligonucleotide
gacagaagcgtcgtcctcaac

SEQ ID NO: 29959 - DNA, 21 bp, Artificial Sequence
  Description of Artificial Sequence: Synthetic oligonucleotide
gacagaacagcaagagcacca

SEQ ID NO: 29960 - DNA, 21 bp, Artificial Sequence
  Description of Artificial Sequence: Synthetic oligonucleotide
gacagaacaaaaagcagcaca

SEQ ID NO: 29961 - DNA, 21 bp, Artificial Sequence
  Description of Artificial Sequence: Synthetic oligonucleotide
gacagaacaacagtcccacca

SEQ ID NO: 29962 - DNA, 21 bp, Artificial Sequence
  Description of Artificial Sequence: Synthetic oligonucleotide
gacagaacagtcagcctcctc

SEQ ID NO: 29963 - DNA, 21 bp, Artificial Sequence
  Description of Artificial Sequence: Synthetic oligonucleotide
gacagagtccacagcagcagc

SEQ ID NO: 29964 - DNA, 21 bp, Artificial Sequence
  Description of Artificial Sequence: Synthetic oligonucleotide
gacagagtcagcacaagcaaa

SEQ ID NO: 29965 - DNA, 21 bp, Artificial Sequence
  Description of Artificial Sequence: Synthetic oligonucleotide
gacagagtcacaccagaacca

SEQ ID NO: 29966 - DNA, 21 bp, Artificial Sequence
  Description of Artificial Sequence: Synthetic oligonucleotide
gacagatggacaagcagcagc

SEQ ID NO: 29967 - DNA, 21 bp, Artificial Sequence
  Description of Artificial Sequence: Synthetic oligonucleotide
gacagcgcaccagtcgcacac

SEQ ID NO: 29968 - DNA, 21 bp, Artificial Sequence
  Description of Artificial Sequence: Synthetic oligonucleotide
gacagcgcaagaagcgcaatc

SEQ ID NO: 29969 - DNA, 21 bp, Artificial Sequence
  Description of Artificial Sequence: Synthetic oligonucleotide
gacagcgacatgatgggagaa

SEQ ID NO: 29970 - DNA, 21 bp, Artificial Sequence
  Description of Artificial Sequence: Synthetic oligonucleotide
gacagcgacagagacagcaaa

SEQ ID NO: 29971 - DNA, 21 bp, Artificial Sequence
  Description of Artificial Sequence: Synthetic oligonucleotide
gacagcgacagactcagcgca

SEQ ID NO: 29972 - DNA, 21 bp, Artificial Sequence
  Description of Artificial Sequence: Synthetic oligonucleotide
gacagcgaaaaaacaatccca

SEQ ID NO: 29973 - DNA, 21 bp, Artificial Sequence
  Description of Artificial Sequence: Synthetic oligonucleotide
gacagcgaagtcccaatgtac

SEQ ID NO: 29974 - DNA, 21 bp, Artificial Sequence
  Description of Artificial Sequence: Synthetic oligonucleotide
gacagcgaagtcagccaccca

SEQ ID NO: 29975 - DNA, 21 bp, Artificial Sequence
  Description of Artificial Sequence: Synthetic oligonucleotide
gacagcttcggaagaccacaa

SEQ ID NO: 29976 - DNA, 21 bp, Artificial Sequence
  Description of Artificial Sequence: Synthetic oligonucleotide
gacagcggagcaagcctcgga

SEQ ID NO: 29977 - DNA, 21 bp, Artificial Sequence
  Description of Artificial Sequence: Synthetic oligonucleotide
gacagcggagacccagcaaga

SEQ ID NO: 29978 - DNA, 21 bp, Artificial Sequence
  Description of Artificial Sequence: Synthetic oligonucleotide
gacagcggaatcggataccca

SEQ ID NO: 29979 - DNA, 21 bp, Artificial Sequence
  Description of Artificial Sequence: Synthetic oligonucleotide
gacagcggaagcaacggactc

SEQ ID NO: 29980 - DNA, 21 bp, Artificial Sequence
  Description of Artificial Sequence: Synthetic oligonucleotide
gacagccactacagagtccca

SEQ ID NO: 29981 - DNA, 21 bp, Artificial Sequence
  Description of Artificial Sequence: Synthetic oligonucleotide
gacagcatcgacccaaaattc

SEQ ID NO: 29982 - DNA, 21 bp, Artificial Sequence
  Description of Artificial Sequence: Synthetic oligonucleotide
gacagcatcggaccaggaaca

SEQ ID NO: 29983 - DNA, 21 bp, Artificial Sequence
  Description of Artificial Sequence: Synthetic oligonucleotide
gacagcatccacatcatggca

SEQ ID NO: 29984 - DNA, 21 bp, Artificial Sequence
  Description of Artificial Sequence: Synthetic oligonucleotide
gacagcatcagcagcagagca

SEQ ID NO: 29985 - DNA, 21 bp, Artificial Sequence
  Description of Artificial Sequence: Synthetic oligonucleotide
gacagcatcacaagagcaagc

SEQ ID NO: 29986 - DNA, 21 bp, Artificial Sequence
  Description of Artificial Sequence: Synthetic oligonucleotide
gacagcatcacaacaagaatc

SEQ ID NO: 29987 - DNA, 21 bp, Artificial Sequence
  Description of Artificial Sequence: Synthetic oligonucleotide
gacagcaaaagaacaatcaca

SEQ ID NO: 29988 - DNA, 21 bp, Artificial Sequence
  Description of Artificial Sequence: Synthetic oligonucleotide
gacagcctcgcaagcagacca

SEQ ID NO: 29989 - DNA, 21 bp, Artificial Sequence
  Description of Artificial Sequence: Synthetic oligonucleotide
gacagcctcggaaaaagaagc

SEQ ID NO: 29990 - DNA, 21 bp, Artificial Sequence
  Description of Artificial Sequence: Synthetic oligonucleotide
gacagcctcaaactcagcagc

SEQ ID NO: 29991 - DNA, 21 bp, Artificial Sequence
  Description of Artificial Sequence: Synthetic oligonucleotide
gacagcatggaactctacagc

SEQ ID NO: 29992 - DNA, 21 bp, Artificial Sequence
  Description of Artificial Sequence: Synthetic oligonucleotide
gacagcatgggagcaagcgga

SEQ ID NO: 29993 - DNA, 21 bp, Artificial Sequence
  Description of Artificial Sequence: Synthetic oligonucleotide
gacagcaacatcccaccaaga

SEQ ID NO: 29994 - DNA, 21 bp, Artificial Sequence
  Description of Artificial Sequence: Synthetic oligonucleotide
gacagcaacaacgaaaaaagc

SEQ ID NO: 29995 - DNA, 21 bp, Artificial Sequence
  Description of Artificial Sequence: Synthetic oligonucleotide
gacagcaacccaagcctcagc

SEQ ID NO: 29996 - DNA, 21 bp, Artificial Sequence
  Description of Artificial Sequence: Synthetic oligonucleotide
gacagcaacagactcgtcgac

SEQ ID NO: 29997 - DNA, 21 bp, Artificial Sequence
  Description of Artificial Sequence: Synthetic oligonucleotide
gacagcccaaaatacagccac

SEQ ID NO: 29998 - DNA, 21 bp, Artificial Sequence
  Description of Artificial Sequence: Synthetic oligonucleotide
gacagcccaagcttcgtcctc

SEQ ID NO: 29999 - DNA, 21 bp, Artificial Sequence
  Description of Artificial Sequence: Synthetic oligonucleotide
gacagccaaatctacgtcagc

SEQ ID NO: 30000 - DNA, 21 bp, Artificial Sequence
  Description of Artificial Sequence: Synthetic oligonucleotide
gacagccaactcaacgcacca

SEQ ID NO: 30001 - DNA, 21 bp, Artificial Sequence
  Description of Artificial Sequence: Synthetic oligonucleotide
gacagccaaatgagaacaatg

SEQ ID NO: 30002 - DNA, 21 bp, Artificial Sequence
  Description of Artificial Sequence: Synthetic oligonucleotide
gacagcagaatcgcagcactc

SEQ ID NO: 30003 - DNA, 21 bp, Artificial Sequence
  Description of Artificial Sequence: Synthetic oligonucleotide
gacagcagactcctcagcgga

SEQ ID NO: 30004 - DNA, 21 bp, Artificial Sequence
  Description of Artificial Sequence: Synthetic oligonucleotide
gacagcagaatggcagcaagc

SEQ ID NO: 30005 - DNA, 21 bp, Artificial Sequence
  Description of Artificial Sequence: Synthetic oligonucleotide
gacagcagaaacgcagtcaca

SEQ ID NO: 30006 - DNA, 21 bp, Artificial Sequence
  Description of Artificial Sequence: Synthetic oligonucleotide
gacagcagaccactcagcgtc

SEQ ID NO: 30007 - DNA, 21 bp, Artificial Sequence
  Description of Artificial Sequence: Synthetic oligonucleotide
gacagcagacaaggaagagtc

SEQ ID NO: 30008 - DNA, 21 bp, Artificial Sequence
  Description of Artificial Sequence: Synthetic oligonucleotide
gacagcagaagcctcagagca

SEQ ID NO: 30009 - DNA, 21 bp, Artificial Sequence
  Description of Artificial Sequence: Synthetic oligonucleotide
gacagcagcgcaaaagaaagc

SEQ ID NO: 30010 - DNA, 21 bp, Artificial Sequence
  Description of Artificial Sequence: Synthetic oligonucleotide
gacagcagcgaatacagccca

SEQ ID NO: 30011 - DNA, 21 bp, Artificial Sequence
  Description of Artificial Sequence: Synthetic oligonucleotide
gacagcagccacacactccaa

SEQ ID NO: 30012 - DNA, 21 bp, Artificial Sequence
  Description of Artificial Sequence: Synthetic oligonucleotide
gacagcagccacacaatgatg

SEQ ID NO: 30013 - DNA, 21 bp, Artificial Sequence
  Description of Artificial Sequence: Synthetic oligonucleotide
gacagcagccactacccagga

SEQ ID NO: 30014 - DNA, 21 bp, Artificial Sequence
  Description of Artificial Sequence: Synthetic oligonucleotide
gacagcagcccactcgtcaga

SEQ ID NO: 30015 - DNA, 21 bp, Artificial Sequence
  Description of Artificial Sequence: Synthetic oligonucleotide
gacagcacaccagaagaagga

SEQ ID NO: 30016 - DNA, 21 bp, Artificial Sequence
  Description of Artificial Sequence: Synthetic oligonucleotide
gacagcacacaattcccaaga

SEQ ID NO: 30017 - DNA, 21 bp, Artificial Sequence
  Description of Artificial Sequence: Synthetic oligonucleotide
gacagcgtccacctcggaaga

SEQ ID NO: 30018 - DNA, 21 bp, Artificial Sequence
  Description of Artificial Sequence: Synthetic oligonucleotide
gacagcgtcaaagcaagccaa

SEQ ID NO: 30019 - DNA, 21 bp, Artificial Sequence
  Description of Artificial Sequence: Synthetic oligonucleotide
gacacagcagcaaaagacagc

SEQ ID NO: 30020 - DNA, 21 bp, Artificial Sequence
  Description of Artificial Sequence: Synthetic oligonucleotide
gacacagcaagcagactcgca

SEQ ID NO: 30021 - DNA, 21 bp, Artificial Sequence
  Description of Artificial Sequence: Synthetic oligonucleotide
gacacagacggacaaagagca

SEQ ID NO: 30022 - DNA, 21 bp, Artificial Sequence
  Description of Artificial Sequence: Synthetic oligonucleotide
gacacacacgcatacgacgga

SEQ ID NO: 30023 - DNA, 21 bp, Artificial Sequence
  Description of Artificial Sequence: Synthetic oligonucleotide
gacacacacatcatcgcaagc

SEQ ID NO: 30024 - DNA, 21 bp, Artificial Sequence
  Description of Artificial Sequence: Synthetic oligonucleotide
gacacacacagaagcgaaaga

SEQ ID NO: 30025 - DNA, 21 bp, Artificial Sequence
  Description of Artificial Sequence: Synthetic oligonucleotide
gacacacacgtcatcgcaagc

SEQ ID NO: 30026 - DNA, 21 bp, Artificial Sequence
  Description of Artificial Sequence: Synthetic oligonucleotide
gacacaatcgcacacgcacca

SEQ ID NO: 30027 - DNA, 21 bp, Artificial Sequence
  Description of Artificial Sequence: Synthetic oligonucleotide
gacacactcgcactcagctgc

SEQ ID NO: 30028 - DNA, 21 bp, Artificial Sequence
  Description of Artificial Sequence: Synthetic oligonucleotide
gacacactcgcaaacagcgca

SEQ ID NO: 30029 - DNA, 21 bp, Artificial Sequence
  Description of Artificial Sequence: Synthetic oligonucleotide
gacacactcggactcgaacca

SEQ ID NO: 30030 - DNA, 21 bp, Artificial Sequence
  Description of Artificial Sequence: Synthetic oligonucleotide
gacacactcatgatcagagga

SEQ ID NO: 30031 - DNA, 21 bp, Artificial Sequence
  Description of Artificial Sequence: Synthetic oligonucleotide
gacacactcagcacaacaaga

SEQ ID NO: 30032 - DNA, 21 bp, Artificial Sequence
  Description of Artificial Sequence: Synthetic oligonucleotide
gacacaaacatgctccacgtc

SEQ ID NO: 30033 - DNA, 21 bp, Artificial Sequence
  Description of Artificial Sequence: Synthetic oligonucleotide
gacacaccagacgcactcaga

SEQ ID NO: 30034 - DNA, 21 bp, Artificial Sequence
  Description of Artificial Sequence: Synthetic oligonucleotide
gacacaccacacctcagcctc

SEQ ID NO: 30035 - DNA, 21 bp, Artificial Sequence
  Description of Artificial Sequence: Synthetic oligonucleotide
gacacaccactcgaactcgca

SEQ ID NO: 30036 - DNA, 21 bp, Artificial Sequence
  Description of Artificial Sequence: Synthetic oligonucleotide
gacacaccaatgccaaaaatc

SEQ ID NO: 30037 - DNA, 21 bp, Artificial Sequence
  Description of Artificial Sequence: Synthetic oligonucleotide
gacacaccaaacgacacagca

SEQ ID NO: 30038 - DNA, 21 bp, Artificial Sequence
  Description of Artificial Sequence: Synthetic oligonucleotide
gacacacaacacctcaaacca

SEQ ID NO: 30039 - DNA, 21 bp, Artificial Sequence
  Description of Artificial Sequence: Synthetic oligonucleotide
gacacacaactcccaaaccca

SEQ ID NO: 30040 - DNA, 21 bp, Artificial Sequence
  Description of Artificial Sequence: Synthetic oligonucleotide
gacacacaactcacactcgca

SEQ ID NO: 30041 - DNA, 21 bp, Artificial Sequence
  Description of Artificial Sequence: Synthetic oligonucleotide
gacacacaaagcgtcagcctc

SEQ ID NO: 30042 - DNA, 21 bp, Artificial Sequence
  Description of Artificial Sequence: Synthetic oligonucleotide
gacacaagagcattcacagga

SEQ ID NO: 30043 - DNA, 21 bp, Artificial Sequence
  Description of Artificial Sequence: Synthetic oligonucleotide
gacacaagacacagcgacctc

SEQ ID NO: 30044 - DNA, 21 bp, Artificial Sequence
  Description of Artificial Sequence: Synthetic oligonucleotide
gacacaagaagagaatgcgac

SEQ ID NO: 30045 - DNA, 21 bp, Artificial Sequence
  Description of Artificial Sequence: Synthetic oligonucleotide
gacacaagcagaacaagcctc

SEQ ID NO: 30046 - DNA, 21 bp, Artificial Sequence
  Description of Artificial Sequence: Synthetic oligonucleotide
gacacaagcagcagaatgaca

SEQ ID NO: 30047 - DNA, 21 bp, Artificial Sequence
  Description of Artificial Sequence: Synthetic oligonucleotide
gacacaagctggaaaagcaca

SEQ ID NO: 30048 - DNA, 21 bp, Artificial Sequence
  Description of Artificial Sequence: Synthetic oligonucleotide
gacacaacagaaagaccatgg

SEQ ID NO: 30049 - DNA, 21 bp, Artificial Sequence
  Description of Artificial Sequence: Synthetic oligonucleotide
gacacaacaggaagatacctc

SEQ ID NO: 30050 - DNA, 21 bp, Artificial Sequence
  Description of Artificial Sequence: Synthetic oligonucleotide
gacacaacactcctcagagga

SEQ ID NO: 30051 - DNA, 21 bp, Artificial Sequence
  Description of Artificial Sequence: Synthetic oligonucleotide
gacacaacaccaatcgtcaga

SEQ ID NO: 30052 - DNA, 21 bp, Artificial Sequence
  Description of Artificial Sequence: Synthetic oligonucleotide
gacacatacgcaatcgcaatc

SEQ ID NO: 30053 - DNA, 21 bp, Artificial Sequence
  Description of Artificial Sequence: Synthetic oligonucleotide
gacacatacaacacaccagca

SEQ ID NO: 30054 - DNA, 21 bp, Artificial Sequence
  Description of Artificial Sequence: Synthetic oligonucleotide
gacgtcgcaagcagaagcctc

SEQ ID NO: 30055 - DNA, 21 bp, Artificial Sequence
  Description of Artificial Sequence: Synthetic oligonucleotide
gacgtcgcaagcagcagactc

SEQ ID NO: 30056 - DNA, 21 bp, Artificial Sequence
  Description of Artificial Sequence: Synthetic oligonucleotide
gacgtcgacgacacaatgtgg

SEQ ID NO: 30057 - DNA, 21 bp, Artificial Sequence
  Description of Artificial Sequence: Synthetic oligonucleotide
gacgtcgacctcctcccaaca

SEQ ID NO: 30058 - DNA, 21 bp, Artificial Sequence
  Description of Artificial Sequence: Synthetic oligonucleotide
gacgtcgacagactcaacaca

SEQ ID NO: 30059 - DNA, 21 bp, Artificial Sequence
  Description of Artificial Sequence: Synthetic oligonucleotide
gacgtcgacagccaccacaca

SEQ ID NO: 30060 - DNA, 21 bp, Artificial Sequence
  Description of Artificial Sequence: Synthetic oligonucleotide
gacgtcgacgtcagacacgga

SEQ ID NO: 30061 - DNA, 21 bp, Artificial Sequence
  Description of Artificial Sequence: Synthetic oligonucleotide
gacgtcgaaccactccaaatg

SEQ ID NO: 30062 - DNA, 21 bp, Artificial Sequence
  Description of Artificial Sequence: Synthetic oligonucleotide
gacgtcttcagaacacaacca

SEQ ID NO: 30063 - DNA, 21 bp, Artificial Sequence
  Description of Artificial Sequence: Synthetic oligonucleotide
gacgtcggaacatacggaaga

SEQ ID NO: 30064 - DNA, 21 bp, Artificial Sequence
  Description of Artificial Sequence: Synthetic oligonucleotide
gacgtcaaaacaaacgtctac

SEQ ID NO: 30065 - DNA, 21 bp, Artificial Sequence
  Description of Artificial Sequence: Synthetic oligonucleotide
gacgtcctcttcagcaaaaac

SEQ ID NO: 30066 - DNA, 21 bp, Artificial Sequence
  Description of Artificial Sequence: Synthetic oligonucleotide
gacgtcctcggaaaacacgca

SEQ ID NO: 30067 - DNA, 21 bp, Artificial Sequence
  Description of Artificial Sequence: Synthetic oligonucleotide
gacgtcctcaaaacagacttc

SEQ ID NO: 30068 - DNA, 21 bp, Artificial Sequence
  Description of Artificial Sequence: Synthetic oligonucleotide
gacgtcctcaacagcacagac

SEQ ID NO: 30069 - DNA, 21 bp, Artificial Sequence
  Description of Artificial Sequence: Synthetic oligonucleotide
gacgtcatgagccaactcctc

SEQ ID NO: 30070 - DNA, 21 bp, Artificial Sequence
  Description of Artificial Sequence: Synthetic oligonucleotide
gacgtcccaaacgcaccatgc

SEQ ID NO: 30071 - DNA, 21 bp, Artificial Sequence
  Description of Artificial Sequence: Synthetic oligonucleotide
gacgtcccaaacccaacagga

SEQ ID NO: 30072 - DNA, 21 bp, Artificial Sequence
  Description of Artificial Sequence: Synthetic oligonucleotide
gacgtcccaaacacaatgaca

SEQ ID NO: 30073 - DNA, 21 bp, Artificial Sequence
  Description of Artificial Sequence: Synthetic oligonucleotide
gacgtcccatacagcctcgaa

SEQ ID NO: 30074 - DNA, 21 bp, Artificial Sequence
  Description of Artificial Sequence: Synthetic oligonucleotide
gacgtccaaatgcacaaacac

SEQ ID NO: 30075 - DNA, 21 bp, Artificial Sequence
  Description of Artificial Sequence: Synthetic oligonucleotide
gacgtcagaaacacaagactc

SEQ ID NO: 30076 - DNA, 21 bp, Artificial Sequence
  Description of Artificial Sequence: Synthetic oligonucleotide
gacgtcagacaagcatacttc

SEQ ID NO: 30077 - DNA, 21 bp, Artificial Sequence
  Description of Artificial Sequence: Synthetic oligonucleotide
gacgtcagagtcggacacatc

SEQ ID NO: 30078 - DNA, 21 bp, Artificial Sequence
  Description of Artificial Sequence: Synthetic oligonucleotide
gacgtcagcggaacaatcgga

SEQ ID NO: 30079 - DNA, 21 bp, Artificial Sequence
  Description of Artificial Sequence: Synthetic oligonucleotide
gacgtcagcctcagagtcaca

SEQ ID NO: 30080 - DNA, 21 bp, Artificial Sequence
  Description of Artificial Sequence: Synthetic oligonucleotide
gacgtcagcagcccactcatc

SEQ ID NO: 30081 - DNA, 21 bp, Artificial Sequence
  Description of Artificial Sequence: Synthetic oligonucleotide
gacgtcagcgtcagcgacgtc

SEQ ID NO: 30082 - DNA, 21 bp, Artificial Sequence
  Description of Artificial Sequence: Synthetic oligonucleotide
gacgtcacagtcggaagcagc

SEQ ID NO: 30083 - DNA, 21 bp, Artificial Sequence
  Description of Artificial Sequence: Synthetic oligonucleotide
gacgtcgtcgcaggaccacca

SEQ ID NO: 30084 - DNA, 21 bp, Artificial Sequence
  Description of Artificial Sequence: Synthetic oligonucleotide
gacgtcgtcaacagcctcaac

SEQ ID NO: 30085 - DNA, 21 bp, Artificial Sequence
  Description of Artificial Sequence: Synthetic oligonucleotide
gacgtcgtcccaagaagcgca

SEQ ID NO: 30086 - DNA, 21 bp, Artificial Sequence
  Description of Artificial Sequence: Synthetic oligonucleotide
gactggggaccaaaacaaaga

SEQ ID NO: 30087 - DNA, 21 bp, Artificial Sequence
  Description of Artificial Sequence: Synthetic oligonucleotide
gactggaaaccaaaccacgaa

SEQ ID NO: 30088 - DNA, 21 bp, Artificial Sequence
  Description of Artificial Sequence: Synthetic oligonucleotide
gactggaaacaaacaacagca

SEQ ID NO: 30089 - DNA, 21 bp, Artificial Sequence
  Description of Artificial Sequence: Synthetic oligonucleotide
gactggcaaagacacggacca

SEQ ID NO: 30090 - DNA, 21 bp, Artificial Sequence
  Description of Artificial Sequence: Synthetic oligonucleotide
gactggacacacatcgacaaa

SEQ ID NO: 30091 - DNA, 21 bp, Artificial Sequence
  Description of Artificial Sequence: Synthetic oligonucleotide
gactggacaccaagaacaaca

SEQ ID NO: 30092 - DNA, 21 bp, Artificial Sequence
  Description of Artificial Sequence: Synthetic oligonucleotide
gactacgcaatcggaaaaaca

SEQ ID NO: 30093 - DNA, 21 bp, Artificial Sequence
  Description of Artificial Sequence: Synthetic oligonucleotide
gactacgaaagcttcagcaga

SEQ ID NO: 30094 - DNA, 21 bp, Artificial Sequence
  Description of Artificial Sequence: Synthetic oligonucleotide
gactacggaccagaaatcatc

SEQ ID NO: 30095 - DNA, 21 bp, Artificial Sequence
  Description of Artificial Sequence: Synthetic oligonucleotide
gactacggacaactcagcaac

SEQ ID NO: 30096 - DNA, 21 bp, Artificial Sequence
  Description of Artificial Sequence: Synthetic oligonucleotide
gactaccaccaaatgcacagc

SEQ ID NO: 30097 - DNA, 21 bp, Artificial Sequence
  Description of Artificial Sequence: Synthetic oligonucleotide
gactaccacagagcaccagga

SEQ ID NO: 30098 - DNA, 21 bp, Artificial Sequence
  Description of Artificial Sequence: Synthetic oligonucleotide
gactacccaccagaagtcctc

SEQ ID NO: 30099 - DNA, 21 bp, Artificial Sequence
  Description of Artificial Sequence: Synthetic oligonucleotide
gactacagagaatacacaaga

SEQ ID NO: 30100 - DNA, 21 bp, Artificial Sequence
  Description of Artificial Sequence: Synthetic oligonucleotide
gactacagattcgcagacagc

SEQ ID NO: 30101 - DNA, 21 bp, Artificial Sequence
  Description of Artificial Sequence: Synthetic oligonucleotide
gactacagaatcacaaacagc

SEQ ID NO: 30102 - DNA, 21 bp, Artificial Sequence
  Description of Artificial Sequence: Synthetic oligonucleotide
gactacagactcctcccagaa

SEQ ID NO: 30103 - DNA, 21 bp, Artificial Sequence
  Description of Artificial Sequence: Synthetic oligonucleotide
gactacagacaaatcgaccaa

SEQ ID NO: 30104 - DNA, 21 bp, Artificial Sequence
  Description of Artificial Sequence: Synthetic oligonucleotide
gactacagcgaaatgagcaaa

SEQ ID NO: 30105 - DNA, 21 bp, Artificial Sequence
  Description of Artificial Sequence: Synthetic oligonucleotide
gactacagcagcgcaagagca

SEQ ID NO: 30106 - DNA, 21 bp, Artificial Sequence
  Description of Artificial Sequence: Synthetic oligonucleotide
gactacagcagcagcatgaga

SEQ ID NO: 30107 - DNA, 21 bp, Artificial Sequence
  Description of Artificial Sequence: Synthetic oligonucleotide
gactacacactcacaccaagc

SEQ ID NO: 30108 - DNA, 21 bp, Artificial Sequence
  Description of Artificial Sequence: Synthetic oligonucleotide
gactacgtcccagtcgaactc

SEQ ID NO: 30109 - DNA, 21 bp, Artificial Sequence
  Description of Artificial Sequence: Synthetic oligonucleotide
gaagcagcacacccaggaatg

SEQ ID NO: 30110 - DNA, 21 bp, Artificial Sequence
  Description of Artificial Sequence: Synthetic oligonucleotide
gaagcagcaatgacaagagaa

SEQ ID NO: 30111 - DNA, 21 bp, Artificial Sequence
  Description of Artificial Sequence: Synthetic oligonucleotide
gaagcagcaccaatcccaaga

SEQ ID NO: 30112 - DNA, 21 bp, Artificial Sequence
  Description of Artificial Sequence: Synthetic oligonucleotide
gaagcagcaagcagacacgac

SEQ ID NO: 30113 - DNA, 21 bp, Artificial Sequence
  Description of Artificial Sequence: Synthetic oligonucleotide
gaagcagcaagcagcccaaaa

SEQ ID NO: 30114 - DNA, 21 bp, Artificial Sequence
  Description of Artificial Sequence: Synthetic oligonucleotide
gaagcagcaacactcacaaca

SEQ ID NO: 30115 - DNA, 21 bp, Artificial Sequence
  Description of Artificial Sequence: Synthetic oligonucleotide
gaagcattccacacaagcagc

SEQ ID NO: 30116 - DNA, 21 bp, Artificial Sequence
  Description of Artificial Sequence: Synthetic oligonucleotide
gaagcattcagcggaagaatc

SEQ ID NO: 30117 - DNA, 21 bp, Artificial Sequence
  Description of Artificial Sequence: Synthetic oligonucleotide
gaagcaaaaacaaacagaaca

SEQ ID NO: 30118 - DNA, 21 bp, Artificial Sequence
  Description of Artificial Sequence: Synthetic oligonucleotide
gaagcactcgcagtcagacca

SEQ ID NO: 30119 - DNA, 21 bp, Artificial Sequence
  Description of Artificial Sequence: Synthetic oligonucleotide
gaagcactcagaggaccaatc

SEQ ID NO: 30120 - DNA, 21 bp, Artificial Sequence
  Description of Artificial Sequence: Synthetic oligonucleotide
gaagcaatgcacagcagagca

SEQ ID NO: 30121 - DNA, 21 bp, Artificial Sequence
  Description of Artificial Sequence: Synthetic oligonucleotide
gaagcaaacgacgaaacaaaa

SEQ ID NO: 30122 - DNA, 21 bp, Artificial Sequence
  Description of Artificial Sequence: Synthetic oligonucleotide
gaagcaaacagaagcccaatg

SEQ ID NO: 30123 - DNA, 21 bp, Artificial Sequence
  Description of Artificial Sequence: Synthetic oligonucleotide
gaagcacaaagagcagcacca

SEQ ID NO: 30124 - DNA, 21 bp, Artificial Sequence
  Description of Artificial Sequence: Synthetic oligonucleotide
gaagcaagacacgtctacgca

SEQ ID NO: 30125 - DNA, 21 bp, Artificial Sequence
  Description of Artificial Sequence: Synthetic oligonucleotide
gaagcaagatacgaaagcgga

SEQ ID NO: 30126 - DNA, 21 bp, Artificial Sequence
  Description of Artificial Sequence: Synthetic oligonucleotide
gaagcaagatacgtccacgtc

SEQ ID NO: 30127 - DNA, 21 bp, Artificial Sequence
  Description of Artificial Sequence: Synthetic oligonucleotide
gaagcaagccacttcacaatg

SEQ ID NO: 30128 - DNA, 21 bp, Artificial Sequence
  Description of Artificial Sequence: Synthetic oligonucleotide
gaagcaagcctcgcagcaaaa

SEQ ID NO: 30129 - DNA, 21 bp, Artificial Sequence
  Description of Artificial Sequence: Synthetic oligonucleotide
gaagcaagcaacgcaatcgca

SEQ ID NO: 30130 - DNA, 21 bp, Artificial Sequence
  Description of Artificial Sequence: Synthetic oligonucleotide
gaagcaagcagagtcacagtc

SEQ ID NO: 30131 - DNA, 21 bp, Artificial Sequence
  Description of Artificial Sequence: Synthetic oligonucleotide
gaagcaagcagcatgcacagc

SEQ ID NO: 30132 - DNA, 21 bp, Artificial Sequence
  Description of Artificial Sequence: Synthetic oligonucleotide
gaagcaagcgtcctcacaaga

SEQ ID NO: 30133 - DNA, 21 bp, Artificial Sequence
  Description of Artificial Sequence: Synthetic oligonucleotide
gaagcaagctacatgccacca

SEQ ID NO: 30134 - DNA, 21 bp, Artificial Sequence
  Description of Artificial Sequence: Synthetic oligonucleotide
gaagcaacaatggtcaaagac

SEQ ID NO: 30135 - DNA, 21 bp, Artificial Sequence
  Description of Artificial Sequence: Synthetic oligonucleotide
gaagcaacaaacagacaccca

SEQ ID NO: 30136 - DNA, 21 bp, Artificial Sequence
  Description of Artificial Sequence: Synthetic oligonucleotide
gaagcaacaccaccaacaatc

SEQ ID NO: 30137 - DNA, 21 bp, Artificial Sequence
  Description of Artificial Sequence: Synthetic oligonucleotide
gaagcaacaacaaacttcctc

SEQ ID NO: 30138 - DNA, 21 bp, Artificial Sequence
  Description of Artificial Sequence: Synthetic oligonucleotide
gaagcaacaacaccaatgcca

SEQ ID NO: 30139 - DNA, 21 bp, Artificial Sequence
  Description of Artificial Sequence: Synthetic oligonucleotide
gaagcagtcacaccaagacac

SEQ ID NO: 30140 - DNA, 21 bp, Artificial Sequence
  Description of Artificial Sequence: Synthetic oligonucleotide
gaagcagtcacagtcaaaatg

SEQ ID NO: 30141 - DNA, 21 bp, Artificial Sequence
  Description of Artificial Sequence: Synthetic oligonucleotide
gaagacgcagaaagagaatac

SEQ ID NO: 30142 - DNA, 21 bp, Artificial Sequence
  Description of Artificial Sequence: Synthetic oligonucleotide
gaagacgcaccaccaagcaga

SEQ ID NO: 30143 - DNA, 21 bp, Artificial Sequence
  Description of Artificial Sequence: Synthetic oligonucleotide
gaagacatcagaatgccaagc

SEQ ID NO: 30144 - DNA, 21 bp, Artificial Sequence
  Description of Artificial Sequence: Synthetic oligonucleotide
gaagacaaacaacacctcagc

SEQ ID NO: 30145 - DNA, 21 bp, Artificial Sequence
  Description of Artificial Sequence: Synthetic oligonucleotide
gaagacctcccaggaaaaatg

SEQ ID NO: 30146 - DNA, 21 bp, Artificial Sequence
  Description of Artificial Sequence: Synthetic oligonucleotide
gaagacatgccacaactcgga

SEQ ID NO: 30147 - DNA, 21 bp, Artificial Sequence
  Description of Artificial Sequence: Synthetic oligonucleotide
gaagacccactcggacaaatg

SEQ ID NO: 30148 - DNA, 21 bp, Artificial Sequence
  Description of Artificial Sequence: Synthetic oligonucleotide
gaagacagccacttcgcacca

SEQ ID NO: 30149 - DNA, 21 bp, Artificial Sequence
  Description of Artificial Sequence: Synthetic oligonucleotide
gaagaagcaatgtacccattc

SEQ ID NO: 30150 - DNA, 21 bp, Artificial Sequence
  Description of Artificial Sequence: Synthetic oligonucleotide
gaagaagcaagcctcagcctc

SEQ ID NO: 30151 - DNA, 21 bp, Artificial Sequence
  Description of Artificial Sequence: Synthetic oligonucleotide
gaagaactcgcaaaagcagac

SEQ ID NO: 30152 - DNA, 21 bp, Artificial Sequence
  Description of Artificial Sequence: Synthetic oligonucleotide
gaagaactcagaagacacgtc

SEQ ID NO: 30153 - DNA, 21 bp, Artificial Sequence
  Description of Artificial Sequence: Synthetic oligonucleotide
gaagaaaacctccaaagaaca

SEQ ID NO: 30154 - DNA, 21 bp, Artificial Sequence
  Description of Artificial Sequence: Synthetic oligonucleotide
gaagaaagcggaagagtcgca

SEQ ID NO: 30155 - DNA, 21 bp, Artificial Sequence
  Description of Artificial Sequence: Synthetic oligonucleotide
gaagaaagcaaaagaagcgca

SEQ ID NO: 30156 - DNA, 21 bp, Artificial Sequence
  Description of Artificial Sequence: Synthetic oligonucleotide
gaagaaagcccagaaagcatc

SEQ ID NO: 30157 - DNA, 21 bp, Artificial Sequence
  Description of Artificial Sequence: Synthetic oligonucleotide
gaagaaacaagaaaaccactc

SEQ ID NO: 30158 - DNA, 21 bp, Artificial Sequence
  Description of Artificial Sequence: Synthetic oligonucleotide
gaagaaacatggcacagactc

SEQ ID NO: 30159 - DNA, 21 bp, Artificial Sequence
  Description of Artificial Sequence: Synthetic oligonucleotide
gaagaatacgtcgaaagaatc

SEQ ID NO: 30160 - DNA, 21 bp, Artificial Sequence
  Description of Artificial Sequence: Synthetic oligonucleotide
gaattcgaccaaagaaacatc

SEQ ID NO: 30161 - DNA, 21 bp, Artificial Sequence
  Description of Artificial Sequence: Synthetic oligonucleotide
gaattcgaaagaagaacaaca

SEQ ID NO: 30162 - DNA, 21 bp, Artificial Sequence
  Description of Artificial Sequence: Synthetic oligonucleotide
gaattcgaagtctgctgcgca

SEQ ID NO: 30163 - DNA, 21 bp, Artificial Sequence
  Description of Artificial Sequence: Synthetic oligonucleotide
gaattcggaatgacagtccca

SEQ ID NO: 30164 - DNA, 21 bp, Artificial Sequence
  Description of Artificial Sequence: Synthetic oligonucleotide
gaattcatcgaaatgagacca

SEQ ID NO: 30165 - DNA, 21 bp, Artificial Sequence
  Description of Artificial Sequence: Synthetic oligonucleotide
gaattcaacggaaaaaacgac

SEQ ID NO: 30166 - DNA, 21 bp, Artificial Sequence
  Description of Artificial Sequence: Synthetic oligonucleotide
gaattcaacaaaagcggagca

SEQ ID NO: 30167 - DNA, 21 bp, Artificial Sequence
  Description of Artificial Sequence: Synthetic oligonucleotide
gaattcaacccagcactcagc

SEQ ID NO: 30168 - DNA, 21 bp, Artificial Sequence
  Description of Artificial Sequence: Synthetic oligonucleotide
gaattcccaagcctcgacgac

SEQ ID NO: 30169 - DNA, 21 bp, Artificial Sequence
  Description of Artificial Sequence: Synthetic oligonucleotide
gaattcccaacaagcctccca

SEQ ID NO: 30170 - DNA, 21 bp, Artificial Sequence
  Description of Artificial Sequence: Synthetic oligonucleotide
gaattccaaaaaaaaagcagc

SEQ ID NO: 30171 - DNA, 21 bp, Artificial Sequence
  Description of Artificial Sequence: Synthetic oligonucleotide
gaattccaaagcctccacgtc

SEQ ID NO: 30172 - DNA, 21 bp, Artificial Sequence
  Description of Artificial Sequence: Synthetic oligonucleotide
gaattcagactcagcgcagtc

SEQ ID NO: 30173 - DNA, 21 bp, Artificial Sequence
  Description of Artificial Sequence: Synthetic oligonucleotide
gaattcagaagcacaggaaca

SEQ ID NO: 30174 - DNA, 21 bp, Artificial Sequence
  Description of Artificial Sequence: Synthetic oligonucleotide
gaattcagccaaatgacagaa

SEQ ID NO: 30175 - DNA, 21 bp, Artificial Sequence
  Description of Artificial Sequence: Synthetic oligonucleotide
gaattcagcagaatgaacaca

SEQ ID NO: 30176 - DNA, 21 bp, Artificial Sequence
  Description of Artificial Sequence: Synthetic oligonucleotide
gaattcagcacaagcctcagc

SEQ ID NO: 30177 - DNA, 21 bp, Artificial Sequence
  Description of Artificial Sequence: Synthetic oligonucleotide
gaattcacacacaacaaagca

SEQ ID NO: 30178 - DNA, 21 bp, Artificial Sequence
  Description of Artificial Sequence: Synthetic oligonucleotide
gaattcacaagcgaagacctc

SEQ ID NO: 30179 - DNA, 21 bp, Artificial Sequence
  Description of Artificial Sequence: Synthetic oligonucleotide
gaattcgtcctcagcctcagc

SEQ ID NO: 30180 - DNA, 21 bp, Artificial Sequence
  Description of Artificial Sequence: Synthetic oligonucleotide
gaattctacaaagactgggac

SEQ ID NO: 30181 - DNA, 21 bp, Artificial Sequence
  Description of Artificial Sequence: Synthetic oligonucleotide
gaaggagcaaacgcagcaaca

SEQ ID NO: 30182 - DNA, 21 bp, Artificial Sequence
  Description of Artificial Sequence: Synthetic oligonucleotide
gaaggagacttcgtcagagca

SEQ ID NO: 30183 - DNA, 21 bp, Artificial Sequence
  Description of Artificial Sequence: Synthetic oligonucleotide
gaaggagacaacagactcttc

SEQ ID NO: 30184 - DNA, 21 bp, Artificial Sequence
  Description of Artificial Sequence: Synthetic oligonucleotide
gaaggagaaaaccaaacaaca

SEQ ID NO: 30185 - DNA, 21 bp, Artificial Sequence
  Description of Artificial Sequence: Synthetic oligonucleotide
gaaggattcgtcggaccagaa

SEQ ID NO: 30186 - DNA, 21 bp, Artificial Sequence
  Description of Artificial Sequence: Synthetic oligonucleotide
gaaggaggacacagactcatc

SEQ ID NO: 30187 - DNA, 21 bp, Artificial Sequence
  Description of Artificial Sequence: Synthetic oligonucleotide
gaaggacacgacacactcatg

SEQ ID NO: 30188 - DNA, 21 bp, Artificial Sequence
  Description of Artificial Sequence: Synthetic oligonucleotide
gaaggaatcctcaaaagcctc

SEQ ID NO: 30189 - DNA, 21 bp, Artificial Sequence
  Description of Artificial Sequence: Synthetic oligonucleotide
gaaggaatcccaccattcagc

SEQ ID NO: 30190 - DNA, 21 bp, Artificial Sequence
  Description of Artificial Sequence: Synthetic oligonucleotide
gaaggaatcagcgcaagcgtc

SEQ ID NO: 30191 - DNA, 21 bp, Artificial Sequence
  Description of Artificial Sequence: Synthetic oligonucleotide
gaaggaaaagtcagactccca

SEQ ID NO: 30192 - DNA, 21 bp, Artificial Sequence
  Description of Artificial Sequence: Synthetic oligonucleotide
gaaggactcggactcagagtc

SEQ ID NO: 30193 - DNA, 21 bp, Artificial Sequence
  Description of Artificial Sequence: Synthetic oligonucleotide
gaaggaatgccactcaaccac

SEQ ID NO: 30194 - DNA, 21 bp, Artificial Sequence
  Description of Artificial Sequence: Synthetic oligonucleotide
gaaggaccagtcctcctcgca

SEQ ID NO: 30195 - DNA, 21 bp, Artificial Sequence
  Description of Artificial Sequence: Synthetic oligonucleotide
gaaggaagaagagaaccatac

SEQ ID NO: 30196 - DNA, 21 bp, Artificial Sequence
  Description of Artificial Sequence: Synthetic oligonucleotide
gaaggaagagtcgtcccagca

SEQ ID NO: 30197 - DNA, 21 bp, Artificial Sequence
  Description of Artificial Sequence: Synthetic oligonucleotide
gaaggaagcttcccactccac

SEQ ID NO: 30198 - DNA, 21 bp, Artificial Sequence
  Description of Artificial Sequence: Synthetic oligonucleotide
gaaggaagcggaatgctcaga

SEQ ID NO: 30199 - DNA, 21 bp, Artificial Sequence
  Description of Artificial Sequence: Synthetic oligonucleotide
gaaggaagcaaaatgatggtc

SEQ ID NO: 30200 - DNA, 21 bp, Artificial Sequence
  Description of Artificial Sequence: Synthetic oligonucleotide
gaaggaagcccagacctcaga

SEQ ID NO: 30201 - DNA, 21 bp, Artificial Sequence
  Description of Artificial Sequence: Synthetic oligonucleotide
gaaggaagcccaagagcaatg

SEQ ID NO: 30202 - DNA, 21 bp, Artificial Sequence
  Description of Artificial Sequence: Synthetic oligonucleotide
gaaggaagccaaaacgacttc

SEQ ID NO: 30203 - DNA, 21 bp, Artificial Sequence
  Description of Artificial Sequence: Synthetic oligonucleotide
gaaggaacagcaagactctac

SEQ ID NO: 30204 - DNA, 21 bp, Artificial Sequence
  Description of Artificial Sequence: Synthetic oligonucleotide
gaaggagtcgtcacactccaa

SEQ ID NO: 30205 - DNA, 21 bp, Artificial Sequence
  Description of Artificial Sequence: Synthetic oligonucleotide
gaaggatacgacagcacaaca

SEQ ID NO: 30206 - DNA, 21 bp, Artificial Sequence
  Description of Artificial Sequence: Synthetic oligonucleotide
gaaggatacgaaaacggagca

SEQ ID NO: 30207 - DNA, 21 bp, Artificial Sequence
  Description of Artificial Sequence: Synthetic oligonucleotide
gaacactgcacaaacacatgc

SEQ ID NO: 30208 - DNA, 21 bp, Artificial Sequence
  Description of Artificial Sequence: Synthetic oligonucleotide
gaacacggaatcgcaatggac

SEQ ID NO: 30209 - DNA, 21 bp, Artificial Sequence
  Description of Artificial Sequence: Synthetic oligonucleotide
gaacacggactcaacacactc

SEQ ID NO: 30210 - DNA, 21 bp, Artificial Sequence
  Description of Artificial Sequence: Synthetic oligonucleotide
gaacacggaccagcactcctc

SEQ ID NO: 30211 - DNA, 21 bp, Artificial Sequence
  Description of Artificial Sequence: Synthetic oligonucleotide
gaacacggaagcgcaatgaaa

SEQ ID NO: 30212 - DNA, 21 bp, Artificial Sequence
  Description of Artificial Sequence: Synthetic oligonucleotide
gaacaccacgtccacagccca

SEQ ID NO: 30213 - DNA, 21 bp, Artificial Sequence
  Description of Artificial Sequence: Synthetic oligonucleotide
gaacacatcccacaagcaatg

SEQ ID NO: 30214 - DNA, 21 bp, Artificial Sequence
  Description of Artificial Sequence: Synthetic oligonucleotide
gaacacaaaggagcacacttc

SEQ ID NO: 30215 - DNA, 21 bp, Artificial Sequence
  Description of Artificial Sequence: Synthetic oligonucleotide
gaacacaaactcctcgtcatg

SEQ ID NO: 30216 - DNA, 21 bp, Artificial Sequence
  Description of Artificial Sequence: Synthetic oligonucleotide
gaacacatgccaagcctcaga

SEQ ID NO: 30217 - DNA, 21 bp, Artificial Sequence
  Description of Artificial Sequence: Synthetic oligonucleotide
gaacacaacgtcggacaaagc

SEQ ID NO: 30218 - DNA, 21 bp, Artificial Sequence
  Description of Artificial Sequence: Synthetic oligonucleotide
gaacaccaaggaacaacaatc

SEQ ID NO: 30219 - DNA, 21 bp, Artificial Sequence
  Description of Artificial Sequence: Synthetic oligonucleotide
gaacacagcgactaccaagtc

SEQ ID NO: 30220 - DNA, 21 bp, Artificial Sequence
  Description of Artificial Sequence: Synthetic oligonucleotide
gaacacagcgaactcacacca

SEQ ID NO: 30221 - DNA, 21 bp, Artificial Sequence
  Description of Artificial Sequence: Synthetic oligonucleotide
gaacacagcttcaaaagcgca

SEQ ID NO: 30222 - DNA, 21 bp, Artificial Sequence
  Description of Artificial Sequence: Synthetic oligonucleotide
gaacacagcggaacagcaatc

SEQ ID NO: 30223 - DNA, 21 bp, Artificial Sequence
  Description of Artificial Sequence: Synthetic oligonucleotide
gaacacagcagcggaatgctc

SEQ ID NO: 30224 - DNA, 21 bp, Artificial Sequence
  Description of Artificial Sequence: Synthetic oligonucleotide
gaaatcgcaagaggaagcttc

SEQ ID NO: 30225 - DNA, 21 bp, Artificial Sequence
  Description of Artificial Sequence: Synthetic oligonucleotide
gaaatcggatacatgagcgca

SEQ ID NO: 30226 - DNA, 21 bp, Artificial Sequence
  Description of Artificial Sequence: Synthetic oligonucleotide
gaaatccactacccactcgaa

SEQ ID NO: 30227 - DNA, 21 bp, Artificial Sequence
  Description of Artificial Sequence: Synthetic oligonucleotide
gaaatcaaagcacaaatgagc

SEQ ID NO: 30228 - DNA, 21 bp, Artificial Sequence
  Description of Artificial Sequence: Synthetic oligonucleotide
gaaatcaaagacgaaaaactc

SEQ ID NO: 30229 - DNA, 21 bp, Artificial Sequence
  Description of Artificial Sequence: Synthetic oligonucleotide
gaaatcaaacacagcatgcac

SEQ ID NO: 30230 - DNA, 21 bp, Artificial Sequence
  Description of Artificial Sequence: Synthetic oligonucleotide
gaaatcaacagccaaacaaac

SEQ ID NO: 30231 - DNA, 21 bp, Artificial Sequence
  Description of Artificial Sequence: Synthetic oligonucleotide
gaaatccaacactaccacgga

SEQ ID NO: 30232 - DNA, 21 bp, Artificial Sequence
  Description of Artificial Sequence: Synthetic oligonucleotide
gaaatcagaaaaagcatcatc

SEQ ID NO: 30233 - DNA, 21 bp, Artificial Sequence
  Description of Artificial Sequence: Synthetic oligonucleotide
gaaatcagcacacaaagatac

SEQ ID NO: 30234 - DNA, 21 bp, Artificial Sequence
  Description of Artificial Sequence: Synthetic oligonucleotide
gaaaaagcaagagcagcaagc

SEQ ID NO: 30235 - DNA, 21 bp, Artificial Sequence
  Description of Artificial Sequence: Synthetic oligonucleotide
gaaaaagaaagaccaatgctc

SEQ ID NO: 30236 - DNA, 21 bp, Artificial Sequence
  Description of Artificial Sequence: Synthetic oligonucleotide
gaaaaaggattcctccacagc

SEQ ID NO: 30237 - DNA, 21 bp, Artificial Sequence
  Description of Artificial Sequence: Synthetic oligonucleotide
gaaaaaggactcagcacacaa

SEQ ID NO: 30238 - DNA, 21 bp, Artificial Sequence
  Description of Artificial Sequence: Synthetic oligonucleotide
gaaaaaggaagcatcatgcca

SEQ ID NO: 30239 - DNA, 21 bp, Artificial Sequence
  Description of Artificial Sequence: Synthetic oligonucleotide
gaaaaaggaagcctcggacac

SEQ ID NO: 30240 - DNA, 21 bp, Artificial Sequence
  Description of Artificial Sequence: Synthetic oligonucleotide
gaaaaaatcgacagactcgga

SEQ ID NO: 30241 - DNA, 21 bp, Artificial Sequence
  Description of Artificial Sequence: Synthetic oligonucleotide
gaaaaaatcaaaatctacagc

SEQ ID NO: 30242 - DNA, 21 bp, Artificial Sequence
  Description of Artificial Sequence: Synthetic oligonucleotide
gaaaaaatcccacacagcagc

SEQ ID NO: 30243 - DNA, 21 bp, Artificial Sequence
  Description of Artificial Sequence: Synthetic oligonucleotide
gaaaaaaaactcagcgcagaa

SEQ ID NO: 30244 - DNA, 21 bp, Artificial Sequence
  Description of Artificial Sequence: Synthetic oligonucleotide
gaaaaactcgcaagaacagga

SEQ ID NO: 30245 - DNA, 21 bp, Artificial Sequence
  Description of Artificial Sequence: Synthetic oligonucleotide
gaaaaaatgcacgcaaaccca

SEQ ID NO: 30246 - DNA, 21 bp, Artificial Sequence
  Description of Artificial Sequence: Synthetic oligonucleotide
gaaaaaccatacatcacaatg

SEQ ID NO: 30247 - DNA, 21 bp, Artificial Sequence
  Description of Artificial Sequence: Synthetic oligonucleotide
gaaaaacaaaacctcccactc

SEQ ID NO: 30248 - DNA, 21 bp, Artificial Sequence
  Description of Artificial Sequence: Synthetic oligonucleotide
gaaaaagtcatcagaccagtc

SEQ ID NO: 30249 - DNA, 21 bp, Artificial Sequence
  Description of Artificial Sequence: Synthetic oligonucleotide
gaaaaagtcccaaaactcctc

SEQ ID NO: 30250 - DNA, 21 bp, Artificial Sequence
  Description of Artificial Sequence: Synthetic oligonucleotide
gaactcgcagcagaagcaaga

SEQ ID NO: 30251 - DNA, 21 bp, Artificial Sequence
  Description of Artificial Sequence: Synthetic oligonucleotide
gaactcgaaagcgcagaaatc

SEQ ID NO: 30252 - DNA, 21 bp, Artificial Sequence
  Description of Artificial Sequence: Synthetic oligonucleotide
gaactcgaaacagcaaaactc

SEQ ID NO: 30253 - DNA, 21 bp, Artificial Sequence
  Description of Artificial Sequence: Synthetic oligonucleotide
gaactcttcagcgacaaattc

SEQ ID NO: 30254 - DNA, 21 bp, Artificial Sequence
  Description of Artificial Sequence: Synthetic oligonucleotide
gaactcggaccaccaagagca

SEQ ID NO: 30255 - DNA, 21 bp, Artificial Sequence
  Description of Artificial Sequence: Synthetic oligonucleotide
gaactcggaccaagaacaagc

SEQ ID NO: 30256 - DNA, 21 bp, Artificial Sequence
  Description of Artificial Sequence: Synthetic oligonucleotide
gaactcatcctcaacagcagc

SEQ ID NO: 30257 - DNA, 21 bp, Artificial Sequence
  Description of Artificial Sequence: Synthetic oligonucleotide
gaactcaaagcagtcgcaaga

SEQ ID NO: 30258 - DNA, 21 bp, Artificial Sequence
  Description of Artificial Sequence: Synthetic oligonucleotide
gaactcaaattcccagacaaa

SEQ ID NO: 30259 - DNA, 21 bp, Artificial Sequence
  Description of Artificial Sequence: Synthetic oligonucleotide
gaactcaaacaagcaagcgga

SEQ ID NO: 30260 - DNA, 21 bp, Artificial Sequence
  Description of Artificial Sequence: Synthetic oligonucleotide
gaactcaaaagatacgtcgga

SEQ ID NO: 30261 - DNA, 21 bp, Artificial Sequence
  Description of Artificial Sequence: Synthetic oligonucleotide
gaactcctcgaaccagacgac

SEQ ID NO: 30262 - DNA, 21 bp, Artificial Sequence
  Description of Artificial Sequence: Synthetic oligonucleotide
gaactcatggtcaacggagga

SEQ ID NO: 30263 - DNA, 21 bp, Artificial Sequence
  Description of Artificial Sequence: Synthetic oligonucleotide
gaactcaacaacctcctcaga

SEQ ID NO: 30264 - DNA, 21 bp, Artificial Sequence
  Description of Artificial Sequence: Synthetic oligonucleotide
gaactcaacgtccacagagga

SEQ ID NO: 30265 - DNA, 21 bp, Artificial Sequence
  Description of Artificial Sequence: Synthetic oligonucleotide
gaactcccagcaaaaagcatg

SEQ ID NO: 30266 - DNA, 21 bp, Artificial Sequence
  Description of Artificial Sequence: Synthetic oligonucleotide
gaactcccagcaacatacgga

SEQ ID NO: 30267 - DNA, 21 bp, Artificial Sequence
  Description of Artificial Sequence: Synthetic oligonucleotide
gaactcccaggaacaccatgc

SEQ ID NO: 30268 - DNA, 21 bp, Artificial Sequence
  Description of Artificial Sequence: Synthetic oligonucleotide
gaactcccactcgactgggac

SEQ ID NO: 30269 - DNA, 21 bp, Artificial Sequence
  Description of Artificial Sequence: Synthetic oligonucleotide
gaactcccaagcaaacaagga

SEQ ID NO: 30270 - DNA, 21 bp, Artificial Sequence
  Description of Artificial Sequence: Synthetic oligonucleotide
gaactccaaggaagaatcaac

SEQ ID NO: 30271 - DNA, 21 bp, Artificial Sequence
  Description of Artificial Sequence: Synthetic oligonucleotide
gaactccaactcccaaaaagc

SEQ ID NO: 30272 - DNA, 21 bp, Artificial Sequence
  Description of Artificial Sequence: Synthetic oligonucleotide
gaactccaagtccaaatggca

SEQ ID NO: 30273 - DNA, 21 bp, Artificial Sequence
  Description of Artificial Sequence: Synthetic oligonucleotide
gaactcagaggaagcgtcaac

SEQ ID NO: 30274 - DNA, 21 bp, Artificial Sequence
  Description of Artificial Sequence: Synthetic oligonucleotide
gaactcagagtcgtccacagc

SEQ ID NO: 30275 - DNA, 21 bp, Artificial Sequence
  Description of Artificial Sequence: Synthetic oligonucleotide
gaactcagcgcaagagcaaca

SEQ ID NO: 30276 - DNA, 21 bp, Artificial Sequence
  Description of Artificial Sequence: Synthetic oligonucleotide
gaactcagcgacggaagcgga

SEQ ID NO: 30277 - DNA, 21 bp, Artificial Sequence
  Description of Artificial Sequence: Synthetic oligonucleotide
gaactcagcttccaattcgac

SEQ ID NO: 30278 - DNA, 21 bp, Artificial Sequence
  Description of Artificial Sequence: Synthetic oligonucleotide
gaactcagcatgggaagctac

SEQ ID NO: 30279 - DNA, 21 bp, Artificial Sequence
  Description of Artificial Sequence: Synthetic oligonucleotide
gaactcagcagaaacaacgtc

SEQ ID NO: 30280 - DNA, 21 bp, Artificial Sequence
  Description of Artificial Sequence: Synthetic oligonucleotide
gaactcagcgtcaacggactc

SEQ ID NO: 30281 - DNA, 21 bp, Artificial Sequence
  Description of Artificial Sequence: Synthetic oligonucleotide
gaactcagctacagaccaaca

SEQ ID NO: 30282 - DNA, 21 bp, Artificial Sequence
  Description of Artificial Sequence: Synthetic oligonucleotide
gaactcacaacaggaaaaagc

SEQ ID NO: 30283 - DNA, 21 bp, Artificial Sequence
  Description of Artificial Sequence: Synthetic oligonucleotide
gaactcacagtcagactcgca

SEQ ID NO: 30284 - DNA, 21 bp, Artificial Sequence
  Description of Artificial Sequence: Synthetic oligonucleotide
gaactcacatacccaggaaga

SEQ ID NO: 30285 - DNA, 21 bp, Artificial Sequence
  Description of Artificial Sequence: Synthetic oligonucleotide
gaactcgtcatgagcgtcaga

SEQ ID NO: 30286 - DNA, 21 bp, Artificial Sequence
  Description of Artificial Sequence: Synthetic oligonucleotide
gaactctacagcagaccagca

SEQ ID NO: 30287 - DNA, 21 bp, Artificial Sequence
  Description of Artificial Sequence: Synthetic oligonucleotide
gaaatggcagcacacctcgaa

SEQ ID NO: 30288 - DNA, 21 bp, Artificial Sequence
  Description of Artificial Sequence: Synthetic oligonucleotide
gaaatggcaccatacagcaaa

SEQ ID NO: 30289 - DNA, 21 bp, Artificial Sequence
  Description of Artificial Sequence: Synthetic oligonucleotide
gaaatggacggaaacgcatac

SEQ ID NO: 30290 - DNA, 21 bp, Artificial Sequence
  Description of Artificial Sequence: Synthetic oligonucleotide
gaaatggaaatgctcagcgac

SEQ ID NO: 30291 - DNA, 21 bp, Artificial Sequence
  Description of Artificial Sequence: Synthetic oligonucleotide
gaaatgggacaactcccagac

SEQ ID NO: 30292 - DNA, 21 bp, Artificial Sequence
  Description of Artificial Sequence: Synthetic oligonucleotide
gaaatgggacaaacactcgaa

SEQ ID NO: 30293 - DNA, 21 bp, Artificial Sequence
  Description of Artificial Sequence: Synthetic oligonucleotide
gaaatgcacgaagacgaaaaa

SEQ ID NO: 30294 - DNA, 21 bp, Artificial Sequence
  Description of Artificial Sequence: Synthetic oligonucleotide
gaaatgctcgaaagattcgac

SEQ ID NO: 30295 - DNA, 21 bp, Artificial Sequence
  Description of Artificial Sequence: Synthetic oligonucleotide
gaaatgctcagagcaggattc

SEQ ID NO: 30296 - DNA, 21 bp, Artificial Sequence
  Description of Artificial Sequence: Synthetic oligonucleotide
gaaatgatggcaaacagcaca

SEQ ID NO: 30297 - DNA, 21 bp, Artificial Sequence
  Description of Artificial Sequence: Synthetic oligonucleotide
gaaatgccaaaaacaccaaaa

SEQ ID NO: 30298 - DNA, 21 bp, Artificial Sequence
  Description of Artificial Sequence: Synthetic oligonucleotide
gaaatgccaacaagacaacca

SEQ ID NO: 30299 - DNA, 21 bp, Artificial Sequence
  Description of Artificial Sequence: Synthetic oligonucleotide
gaaatgccaacatacaacgac

SEQ ID NO: 30300 - DNA, 21 bp, Artificial Sequence
  Description of Artificial Sequence: Synthetic oligonucleotide
gaaatgagacaacaaagcatc

SEQ ID NO: 30301 - DNA, 21 bp, Artificial Sequence
  Description of Artificial Sequence: Synthetic oligonucleotide
gaaatgagaagcagcacaagc

SEQ ID NO: 30302 - DNA, 21 bp, Artificial Sequence
  Description of Artificial Sequence: Synthetic oligonucleotide
gaaatgacacaactcccagca

SEQ ID NO: 30303 - DNA, 21 bp, Artificial Sequence
  Description of Artificial Sequence: Synthetic oligonucleotide
gaaatgtacctcacaagagtc

SEQ ID NO: 30304 - DNA, 21 bp, Artificial Sequence
  Description of Artificial Sequence: Synthetic oligonucleotide
gaaaacgcagtcccaggagtc

SEQ ID NO: 30305 - DNA, 21 bp, Artificial Sequence
  Description of Artificial Sequence: Synthetic oligonucleotide
gaaaacgacagaagcagcaca

SEQ ID NO: 30306 - DNA, 21 bp, Artificial Sequence
  Description of Artificial Sequence: Synthetic oligonucleotide
gaaaacgaaggaacaggaaca

SEQ ID NO: 30307 - DNA, 21 bp, Artificial Sequence
  Description of Artificial Sequence: Synthetic oligonucleotide
gaaaacgaaagccaccacctc

SEQ ID NO: 30308 - DNA, 21 bp, Artificial Sequence
  Description of Artificial Sequence: Synthetic oligonucleotide
gaaaacggacacagcttcaca

SEQ ID NO: 30309 - DNA, 21 bp, Artificial Sequence
  Description of Artificial Sequence: Synthetic oligonucleotide
gaaaacggaagaacagaaatc

SEQ ID NO: 30310 - DNA, 21 bp, Artificial Sequence
  Description of Artificial Sequence: Synthetic oligonucleotide
gaaaacaaaccaggaagccca

SEQ ID NO: 30311 - DNA, 21 bp, Artificial Sequence
  Description of Artificial Sequence: Synthetic oligonucleotide
gaaaacatggcatacctcagc

SEQ ID NO: 30312 - DNA, 21 bp, Artificial Sequence
  Description of Artificial Sequence: Synthetic oligonucleotide
gaaaacccaggaagcgcaagc

SEQ ID NO: 30313 - DNA, 21 bp, Artificial Sequence
  Description of Artificial Sequence: Synthetic oligonucleotide
gaaaacccaccaagagaacca

SEQ ID NO: 30314 - DNA, 21 bp, Artificial Sequence
  Description of Artificial Sequence: Synthetic oligonucleotide
gaaaacccaagaggaagcgtc

SEQ ID NO: 30315 - DNA, 21 bp, Artificial Sequence
  Description of Artificial Sequence: Synthetic oligonucleotide
gaaaacccaacaatgtacagc

SEQ ID NO: 30316 - DNA, 21 bp, Artificial Sequence
  Description of Artificial Sequence: Synthetic oligonucleotide
gaaaaccaataccaagacagc

SEQ ID NO: 30317 - DNA, 21 bp, Artificial Sequence
  Description of Artificial Sequence: Synthetic oligonucleotide
gaaaacagactcaaaaacttc

SEQ ID NO: 30318 - DNA, 21 bp, Artificial Sequence
  Description of Artificial Sequence: Synthetic oligonucleotide
gaaaacagaagcggagaagac

SEQ ID NO: 30319 - DNA, 21 bp, Artificial Sequence
  Description of Artificial Sequence: Synthetic oligonucleotide
gaaaacagcagcctcgtcgac

SEQ ID NO: 30320 - DNA, 21 bp, Artificial Sequence
  Description of Artificial Sequence: Synthetic oligonucleotide
gaaaacacattcagcagcaga

SEQ ID NO: 30321 - DNA, 21 bp, Artificial Sequence
  Description of Artificial Sequence: Synthetic oligonucleotide
gaaaacacaatcacaagcctc

SEQ ID NO: 30322 - DNA, 21 bp, Artificial Sequence
  Description of Artificial Sequence: Synthetic oligonucleotide
gaaaacacactcagactcgac

SEQ ID NO: 30323 - DNA, 21 bp, Artificial Sequence
  Description of Artificial Sequence: Synthetic oligonucleotide
gaaaacgtcaaaccaggatgg

SEQ ID NO: 30324 - DNA, 21 bp, Artificial Sequence
  Description of Artificial Sequence: Synthetic oligonucleotide
gaaccagcagcaagagcagtc

SEQ ID NO: 30325 - DNA, 21 bp, Artificial Sequence
  Description of Artificial Sequence: Synthetic oligonucleotide
gaaccagcagacagaacacaa

SEQ ID NO: 30326 - DNA, 21 bp, Artificial Sequence
  Description of Artificial Sequence: Synthetic oligonucleotide
gaaccagcaggaccaagactc

SEQ ID NO: 30327 - DNA, 21 bp, Artificial Sequence
  Description of Artificial Sequence: Synthetic oligonucleotide
gaaccagcactcccatacgca

SEQ ID NO: 30328 - DNA, 21 bp, Artificial Sequence
  Description of Artificial Sequence: Synthetic oligonucleotide
gaaccagcaacaggaagcagc

SEQ ID NO: 30329 - DNA, 21 bp, Artificial Sequence
  Description of Artificial Sequence: Synthetic oligonucleotide
gaaccagacagcgcatacagc

SEQ ID NO: 30330 - DNA, 21 bp, Artificial Sequence
  Description of Artificial Sequence: Synthetic oligonucleotide
gaaccattcgacgcaaaaaca

SEQ ID NO: 30331 - DNA, 21 bp, Artificial Sequence
  Description of Artificial Sequence: Synthetic oligonucleotide
gaaccattcagcaacagccca

SEQ ID NO: 30332 - DNA, 21 bp, Artificial Sequence
  Description of Artificial Sequence: Synthetic oligonucleotide
gaaccaggaggaaaccacctc

SEQ ID NO: 30333 - DNA, 21 bp, Artificial Sequence
  Description of Artificial Sequence: Synthetic oligonucleotide
gaaccaggacacgcaagagca

SEQ ID NO: 30334 - DNA, 21 bp, Artificial Sequence
  Description of Artificial Sequence: Synthetic oligonucleotide
gaaccaggaagaacaggattc

SEQ ID NO: 30335 - DNA, 21 bp, Artificial Sequence
  Description of Artificial Sequence: Synthetic oligonucleotide
gaaccaggagtcgtcggatgc

SEQ ID NO: 30336 - DNA, 21 bp, Artificial Sequence
  Description of Artificial Sequence: Synthetic oligonucleotide
gaaccacacgcaccagaaaga

SEQ ID NO: 30337 - DNA, 21 bp, Artificial Sequence
  Description of Artificial Sequence: Synthetic oligonucleotide
gaaccacacgtcccaggagca

SEQ ID NO: 30338 - DNA, 21 bp, Artificial Sequence
  Description of Artificial Sequence: Synthetic oligonucleotide
gaaccaaaacaccaattcagc

SEQ ID NO: 30339 - DNA, 21 bp, Artificial Sequence
  Description of Artificial Sequence: Synthetic oligonucleotide
gaaccaaaaagaggatggagc

SEQ ID NO: 30340 - DNA, 21 bp, Artificial Sequence
  Description of Artificial Sequence: Synthetic oligonucleotide
gaaccaaaaagcgcaagcatc

SEQ ID NO: 30341 - DNA, 21 bp, Artificial Sequence
  Description of Artificial Sequence: Synthetic oligonucleotide
gaaccactcaacagcagcgga

SEQ ID NO: 30342 - DNA, 21 bp, Artificial Sequence
  Description of Artificial Sequence: Synthetic oligonucleotide
gaaccactcagcgcaaacaga

SEQ ID NO: 30343 - DNA, 21 bp, Artificial Sequence
  Description of Artificial Sequence: Synthetic oligonucleotide
gaaccaaacgcaacaagcgtc

SEQ ID NO: 30344 - DNA, 21 bp, Artificial Sequence
  Description of Artificial Sequence: Synthetic oligonucleotide
gaaccaaaccacccagtcagc

SEQ ID NO: 30345 - DNA, 21 bp, Artificial Sequence
  Description of Artificial Sequence: Synthetic oligonucleotide
gaaccaccaagcagcctcaaa

SEQ ID NO: 30346 - DNA, 21 bp, Artificial Sequence
  Description of Artificial Sequence: Synthetic oligonucleotide
gaaccacaaagaccactcaga

SEQ ID NO: 30347 - DNA, 21 bp, Artificial Sequence
  Description of Artificial Sequence: Synthetic oligonucleotide
gaaccaagcaacgaaagcgca

SEQ ID NO: 30348 - DNA, 21 bp, Artificial Sequence
  Description of Artificial Sequence: Synthetic oligonucleotide
gaaccaagcaacagccacgca

SEQ ID NO: 30349 - DNA, 21 bp, Artificial Sequence
  Description of Artificial Sequence: Synthetic oligonucleotide
gaaccaagctacctcccaagc

SEQ ID NO: 30350 - DNA, 21 bp, Artificial Sequence
  Description of Artificial Sequence: Synthetic oligonucleotide
gaaccaacagaaagaatcagc

SEQ ID NO: 30351 - DNA, 21 bp, Artificial Sequence
  Description of Artificial Sequence: Synthetic oligonucleotide
gaaccaacaatctacctcaca

SEQ ID NO: 30352 - DNA, 21 bp, Artificial Sequence
  Description of Artificial Sequence: Synthetic oligonucleotide
gaaccaacaatgagaagcatc

SEQ ID NO: 30353 - DNA, 21 bp, Artificial Sequence
  Description of Artificial Sequence: Synthetic oligonucleotide
gaaccaacaagaccagcaaca

SEQ ID NO: 30354 - DNA, 21 bp, Artificial Sequence
  Description of Artificial Sequence: Synthetic oligonucleotide
gaaccaacaagaagcagcagc

SEQ ID NO: 30355 - DNA, 21 bp, Artificial Sequence
  Description of Artificial Sequence: Synthetic oligonucleotide
gaaccaacaagaacaaaaatg

SEQ ID NO: 30356 - DNA, 21 bp, Artificial Sequence
  Description of Artificial Sequence: Synthetic oligonucleotide
gaaccagtcatcggattccca

SEQ ID NO: 30357 - DNA, 21 bp, Artificial Sequence
  Description of Artificial Sequence: Synthetic oligonucleotide
gaaccagtcagcacagcagca

SEQ ID NO: 30358 - DNA, 21 bp, Artificial Sequence
  Description of Artificial Sequence: Synthetic oligonucleotide
gaaccatacctcagcgcaaaa

SEQ ID NO: 30359 - DNA, 21 bp, Artificial Sequence
  Description of Artificial Sequence: Synthetic oligonucleotide
gaaccatacagcccagcaatc

SEQ ID NO: 30360 - DNA, 21 bp, Artificial Sequence
  Description of Artificial Sequence: Synthetic oligonucleotide
gaacaagcagcactcagcttc

SEQ ID NO: 30361 - DNA, 21 bp, Artificial Sequence
  Description of Artificial Sequence: Synthetic oligonucleotide
gaacaagcactcaaaccagaa

SEQ ID NO: 30362 - DNA, 21 bp, Artificial Sequence
  Description of Artificial Sequence: Synthetic oligonucleotide
gaacaagcaagactcgacgtc

SEQ ID NO: 30363 - DNA, 21 bp, Artificial Sequence
  Description of Artificial Sequence: Synthetic oligonucleotide
gaacaagcaagcttcaaaatc

SEQ ID NO: 30364 - DNA, 21 bp, Artificial Sequence
  Description of Artificial Sequence: Synthetic oligonucleotide
gaacaattcgcagcaccagtc

SEQ ID NO: 30365 - DNA, 21 bp, Artificial Sequence
  Description of Artificial Sequence: Synthetic oligonucleotide
gaacaaggaacaccaagcgca

SEQ ID NO: 30366 - DNA, 21 bp, Artificial Sequence
  Description of Artificial Sequence: Synthetic oligonucleotide
gaacaaaaaccactcacaaga

SEQ ID NO: 30367 - DNA, 21 bp, Artificial Sequence
  Description of Artificial Sequence: Synthetic oligonucleotide
gaacaactcaaagactacgaa

SEQ ID NO: 30368 - DNA, 21 bp, Artificial Sequence
  Description of Artificial Sequence: Synthetic oligonucleotide
gaacaaaacagcagaggactc

SEQ ID NO: 30369 - DNA, 21 bp, Artificial Sequence
  Description of Artificial Sequence: Synthetic oligonucleotide
gaacaaccaaaatacagcaaa

SEQ ID NO: 30370 - DNA, 21 bp, Artificial Sequence
  Description of Artificial Sequence: Synthetic oligonucleotide
gaacaacaatgcccaagaagc

SEQ ID NO: 30371 - DNA, 21 bp, Artificial Sequence
  Description of Artificial Sequence: Synthetic oligonucleotide
gaacaaagagacagaaacgga

SEQ ID NO: 30372 - DNA, 21 bp, Artificial Sequence
  Description of Artificial Sequence: Synthetic oligonucleotide
gaacaaagaggaacaatcctc

SEQ ID NO: 30373 - DNA, 21 bp, Artificial Sequence
  Description of Artificial Sequence: Synthetic oligonucleotide
gaacaaagactcagccaaagc

SEQ ID NO: 30374 - DNA, 21 bp, Artificial Sequence
  Description of Artificial Sequence: Synthetic oligonucleotide
gaacaaagaagaagcgaaaca

SEQ ID NO: 30375 - DNA, 21 bp, Artificial Sequence
  Description of Artificial Sequence: Synthetic oligonucleotide
gaacaaagctacagagacagc

SEQ ID NO: 30376 - DNA, 21 bp, Artificial Sequence
  Description of Artificial Sequence: Synthetic oligonucleotide
gaacaaacaggacacagagca

SEQ ID NO: 30377 - DNA, 21 bp, Artificial Sequence
  Description of Artificial Sequence: Synthetic oligonucleotide
gaacaatacagagacaacagc

SEQ ID NO: 30378 - DNA, 21 bp, Artificial Sequence
  Description of Artificial Sequence: Synthetic oligonucleotide
gaaagagcagcaggactcaga

SEQ ID NO: 30379 - DNA, 21 bp, Artificial Sequence
  Description of Artificial Sequence: Synthetic oligonucleotide
gaaagagcaggaccacacgac

SEQ ID NO: 30380 - DNA, 21 bp, Artificial Sequence
  Description of Artificial Sequence: Synthetic oligonucleotide
gaaagagcaccaccaggactc

SEQ ID NO: 30381 - DNA, 21 bp, Artificial Sequence
  Description of Artificial Sequence: Synthetic oligonucleotide
gaaagagacagcagaaaagca

SEQ ID NO: 30382 - DNA, 21 bp, Artificial Sequence
  Description of Artificial Sequence: Synthetic oligonucleotide
gaaagattcgaaggactcaga

SEQ ID NO: 30383 - DNA, 21 bp, Artificial Sequence
  Description of Artificial Sequence: Synthetic oligonucleotide
gaaagattcctcccagaactc

SEQ ID NO: 30384 - DNA, 21 bp, Artificial Sequence
  Description of Artificial Sequence: Synthetic oligonucleotide
gaaagattcacaagcgtccca

SEQ ID NO: 30385 - DNA, 21 bp, Artificial Sequence
  Description of Artificial Sequence: Synthetic oligonucleotide
gaaagaggaatgacaacacca

SEQ ID NO: 30386 - DNA, 21 bp, Artificial Sequence
  Description of Artificial Sequence: Synthetic oligonucleotide
gaaagaggagtcatccaccca

SEQ ID NO: 30387 - DNA, 21 bp, Artificial Sequence
  Description of Artificial Sequence: Synthetic oligonucleotide
gaaagacacgcagacatgaca

SEQ ID NO: 30388 - DNA, 21 bp, Artificial Sequence
  Description of Artificial Sequence: Synthetic oligonucleotide
gaaagacacgacctcccaaga

SEQ ID NO: 30389 - DNA, 21 bp, Artificial Sequence
  Description of Artificial Sequence: Synthetic oligonucleotide
gaaagacacgacgtcggacca

SEQ ID NO: 30390 - DNA, 21 bp, Artificial Sequence
  Description of Artificial Sequence: Synthetic oligonucleotide
gaaagacacatcagaatggaa

SEQ ID NO: 30391 - DNA, 21 bp, Artificial Sequence
  Description of Artificial Sequence: Synthetic oligonucleotide
gaaagacacagagtcatcgac

SEQ ID NO: 30392 - DNA, 21 bp, Artificial Sequence
  Description of Artificial Sequence: Synthetic oligonucleotide
gaaagaatcagaacaccagaa

SEQ ID NO: 30393 - DNA, 21 bp, Artificial Sequence
  Description of Artificial Sequence: Synthetic oligonucleotide
gaaagaatcagcccaagcatc

SEQ ID NO: 30394 - DNA, 21 bp, Artificial Sequence
  Description of Artificial Sequence: Synthetic oligonucleotide
gaaagaaaaggactcggactc

SEQ ID NO: 30395 - DNA, 21 bp, Artificial Sequence
  Description of Artificial Sequence: Synthetic oligonucleotide
gaaagaaaaaaccaaagccca

SEQ ID NO: 30396 - DNA, 21 bp, Artificial Sequence
  Description of Artificial Sequence: Synthetic oligonucleotide
gaaagaaaaacaccaagcgac

SEQ ID NO: 30397 - DNA, 21 bp, Artificial Sequence
  Description of Artificial Sequence: Synthetic oligonucleotide
gaaagactcgaaagcagcctc

SEQ ID NO: 30398 - DNA, 21 bp, Artificial Sequence
  Description of Artificial Sequence: Synthetic oligonucleotide
gaaagactcagcccagtcgca

SEQ ID NO: 30399 - DNA, 21 bp, Artificial Sequence
  Description of Artificial Sequence: Synthetic oligonucleotide
gaaagactcagcagcgaacca

SEQ ID NO: 30400 - DNA, 21 bp, Artificial Sequence
  Description of Artificial Sequence: Synthetic oligonucleotide
gaaagaatggcagcaccattc

SEQ ID NO: 30401 - DNA, 21 bp, Artificial Sequence
  Description of Artificial Sequence: Synthetic oligonucleotide
gaaagaaacttcgaaagcgga

SEQ ID NO: 30402 - DNA, 21 bp, Artificial Sequence
  Description of Artificial Sequence: Synthetic oligonucleotide
gaaagaaacggactcccagca

SEQ ID NO: 30403 - DNA, 21 bp, Artificial Sequence
  Description of Artificial Sequence: Synthetic oligonucleotide
gaaagaaacagagtcgacagc

SEQ ID NO: 30404 - DNA, 21 bp, Artificial Sequence
  Description of Artificial Sequence: Synthetic oligonucleotide
gaaagaaacagcccagtcgca

SEQ ID NO: 30405 - DNA, 21 bp, Artificial Sequence
  Description of Artificial Sequence: Synthetic oligonucleotide
gaaagaccagacggaccaagc

SEQ ID NO: 30406 - DNA, 21 bp, Artificial Sequence
  Description of Artificial Sequence: Synthetic oligonucleotide
gaaagaccaccactcgtcatg

SEQ ID NO: 30407 - DNA, 21 bp, Artificial Sequence
  Description of Artificial Sequence: Synthetic oligonucleotide
gaaagaccatacgcaacagtc

SEQ ID NO: 30408 - DNA, 21 bp, Artificial Sequence
  Description of Artificial Sequence: Synthetic oligonucleotide
gaaagacaagcattccacgaa

SEQ ID NO: 30409 - DNA, 21 bp, Artificial Sequence
  Description of Artificial Sequence: Synthetic oligonucleotide
gaaagacaaccaatgatcaaa

SEQ ID NO: 30410 - DNA, 21 bp, Artificial Sequence
  Description of Artificial Sequence: Synthetic oligonucleotide
gaaagacaaagagacagcgca

SEQ ID NO: 30411 - DNA, 21 bp, Artificial Sequence
  Description of Artificial Sequence: Synthetic oligonucleotide
gaaagacaaacaacactcgca

SEQ ID NO: 30412 - DNA, 21 bp, Artificial Sequence
  Description of Artificial Sequence: Synthetic oligonucleotide
gaaagaagaatcggagcaagc

SEQ ID NO: 30413 - DNA, 21 bp, Artificial Sequence
  Description of Artificial Sequence: Synthetic oligonucleotide
gaaagaagaccaggaacaagc

SEQ ID NO: 30414 - DNA, 21 bp, Artificial Sequence
  Description of Artificial Sequence: Synthetic oligonucleotide
gaaagaagcaaaccagtcgca

SEQ ID NO: 30415 - DNA, 21 bp, Artificial Sequence
  Description of Artificial Sequence: Synthetic oligonucleotide
gaaagaagcagaggacaacaa

SEQ ID NO: 30416 - DNA, 21 bp, Artificial Sequence
  Description of Artificial Sequence: Synthetic oligonucleotide
gaaagaagcagcccacaacca

SEQ ID NO: 30417 - DNA, 21 bp, Artificial Sequence
  Description of Artificial Sequence: Synthetic oligonucleotide
gaaagaagcagcagagaaaca

SEQ ID NO: 30418 - DNA, 21 bp, Artificial Sequence
  Description of Artificial Sequence: Synthetic oligonucleotide
gaaagaacagcagtcggagtc

SEQ ID NO: 30419 - DNA, 21 bp, Artificial Sequence
  Description of Artificial Sequence: Synthetic oligonucleotide
gaaagaacaaaaccaccaaca

SEQ ID NO: 30420 - DNA, 21 bp, Artificial Sequence
  Description of Artificial Sequence: Synthetic oligonucleotide
gaaagatacccaagcatcagc

SEQ ID NO: 30421 - DNA, 21 bp, Artificial Sequence
  Description of Artificial Sequence: Synthetic oligonucleotide
gaaagcgcattcaaaagatgc

SEQ ID NO: 30422 - DNA, 21 bp, Artificial Sequence
  Description of Artificial Sequence: Synthetic oligonucleotide
gaaagcgcatggatgcaagac

SEQ ID NO: 30423 - DNA, 21 bp, Artificial Sequence
  Description of Artificial Sequence: Synthetic oligonucleotide
gaaagcttcacaggagtccac

SEQ ID NO: 30424 - DNA, 21 bp, Artificial Sequence
  Description of Artificial Sequence: Synthetic oligonucleotide
gaaagcggagacaaactcaga

SEQ ID NO: 30425 - DNA, 21 bp, Artificial Sequence
  Description of Artificial Sequence: Synthetic oligonucleotide
gaaagcggaatcctccaactc

SEQ ID NO: 30426 - DNA, 21 bp, Artificial Sequence
  Description of Artificial Sequence: Synthetic oligonucleotide
gaaagcggactcacacaaaca

SEQ ID NO: 30427 - DNA, 21 bp, Artificial Sequence
  Description of Artificial Sequence: Synthetic oligonucleotide
gaaagcggaagaccaatggtc

SEQ ID NO: 30428 - DNA, 21 bp, Artificial Sequence
  Description of Artificial Sequence: Synthetic oligonucleotide
gaaagcatcacaagaagcgtc

SEQ ID NO: 30429 - DNA, 21 bp, Artificial Sequence
  Description of Artificial Sequence: Synthetic oligonucleotide
gaaagcatcgtcggaagaaga

SEQ ID NO: 30430 - DNA, 21 bp, Artificial Sequence
  Description of Artificial Sequence: Synthetic oligonucleotide
gaaagcaaagaactcacaagc

SEQ ID NO: 30431 - DNA, 21 bp, Artificial Sequence
  Description of Artificial Sequence: Synthetic oligonucleotide
gaaagcaaaggagcacacgca

SEQ ID NO: 30432 - DNA, 21 bp, Artificial Sequence
  Description of Artificial Sequence: Synthetic oligonucleotide
gaaagcaaacacttcagccca

SEQ ID NO: 30433 - DNA, 21 bp, Artificial Sequence
  Description of Artificial Sequence: Synthetic oligonucleotide
gaaagcaaaatcggaagacca

SEQ ID NO: 30434 - DNA, 21 bp, Artificial Sequence
  Description of Artificial Sequence: Synthetic oligonucleotide
gaaagcaaaccaaacagcaga

SEQ ID NO: 30435 - DNA, 21 bp, Artificial Sequence
  Description of Artificial Sequence: Synthetic oligonucleotide
gaaagcccagacagaagcaca

SEQ ID NO: 30436 - DNA, 21 bp, Artificial Sequence
  Description of Artificial Sequence: Synthetic oligonucleotide
gaaagcccattcagcgtccca

SEQ ID NO: 30437 - DNA, 21 bp, Artificial Sequence
  Description of Artificial Sequence: Synthetic oligonucleotide
gaaagcccaaaagcagaccca

SEQ ID NO: 30438 - DNA, 21 bp, Artificial Sequence
  Description of Artificial Sequence: Synthetic oligonucleotide
gaaagcccaatggtcagccca

SEQ ID NO: 30439 - DNA, 21 bp, Artificial Sequence
  Description of Artificial Sequence: Synthetic oligonucleotide
gaaagccaagtcctcgtctac

SEQ ID NO: 30440 - DNA, 21 bp, Artificial Sequence
  Description of Artificial Sequence: Synthetic oligonucleotide
gaaagcagacaagcattccca

SEQ ID NO: 30441 - DNA, 21 bp, Artificial Sequence
  Description of Artificial Sequence: Synthetic oligonucleotide
gaaagcagaagcgcagcatac

SEQ ID NO: 30442 - DNA, 21 bp, Artificial Sequence
  Description of Artificial Sequence: Synthetic oligonucleotide
gaaagcagaagcgcactccca

SEQ ID NO: 30443 - DNA, 21 bp, Artificial Sequence
  Description of Artificial Sequence: Synthetic oligonucleotide
gaaagcagagtcggatacatc

SEQ ID NO: 30444 - DNA, 21 bp, Artificial Sequence
  Description of Artificial Sequence: Synthetic oligonucleotide
gaaagcagagtcagcctcgga

SEQ ID NO: 30445 - DNA, 21 bp, Artificial Sequence
  Description of Artificial Sequence: Synthetic oligonucleotide
gaaagcagccaacacctcgac

SEQ ID NO: 30446 - DNA, 21 bp, Artificial Sequence
  Description of Artificial Sequence: Synthetic oligonucleotide
gaaagcagcagagaattccac

SEQ ID NO: 30447 - DNA, 21 bp, Artificial Sequence
  Description of Artificial Sequence: Synthetic oligonucleotide
gaaagcagcagagaactccac

SEQ ID NO: 30448 - DNA, 21 bp, Artificial Sequence
  Description of Artificial Sequence: Synthetic oligonucleotide
gaaagcagcagcgaactccac

SEQ ID NO: 30449 - DNA, 21 bp, Artificial Sequence
  Description of Artificial Sequence: Synthetic oligonucleotide
gaaagcagcagcagaatgctc

SEQ ID NO: 30450 - DNA, 21 bp, Artificial Sequence
  Description of Artificial Sequence: Synthetic oligonucleotide
gaaagcacagcactcaaaaga

SEQ ID NO: 30451 - DNA, 21 bp, Artificial Sequence
  Description of Artificial Sequence: Synthetic oligonucleotide
gaaagcacaagcagcagaagc

SEQ ID NO: 30452 - DNA, 21 bp, Artificial Sequence
  Description of Artificial Sequence: Synthetic oligonucleotide
gaaagcgtcgaaaacgacagc

SEQ ID NO: 30453 - DNA, 21 bp, Artificial Sequence
  Description of Artificial Sequence: Synthetic oligonucleotide
gaaagcgtcttcaaagcagca

SEQ ID NO: 30454 - DNA, 21 bp, Artificial Sequence
  Description of Artificial Sequence: Synthetic oligonucleotide
gaaagcgtcggatacgcagac

SEQ ID NO: 30455 - DNA, 21 bp, Artificial Sequence
  Description of Artificial Sequence: Synthetic oligonucleotide
gaaagcgtcagactccaaaac

SEQ ID NO: 30456 - DNA, 21 bp, Artificial Sequence
  Description of Artificial Sequence: Synthetic oligonucleotide
gaaagctacacagaaagcctc

SEQ ID NO: 30457 - DNA, 21 bp, Artificial Sequence
  Description of Artificial Sequence: Synthetic oligonucleotide
gaaacagcaaaaagcggacaa

SEQ ID NO: 30458 - DNA, 21 bp, Artificial Sequence
  Description of Artificial Sequence: Synthetic oligonucleotide
gaaacagacagaaaactcagc

SEQ ID NO: 30459 - DNA, 21 bp, Artificial Sequence
  Description of Artificial Sequence: Synthetic oligonucleotide
gaaacagacagaaacgcaagc

SEQ ID NO: 30460 - DNA, 21 bp, Artificial Sequence
  Description of Artificial Sequence: Synthetic oligonucleotide
gaaacagaacacacagtcgtc

SEQ ID NO: 30461 - DNA, 21 bp, Artificial Sequence
  Description of Artificial Sequence: Synthetic oligonucleotide
gaaacattcacaagaagcgtc

SEQ ID NO: 30462 - DNA, 21 bp, Artificial Sequence
  Description of Artificial Sequence: Synthetic oligonucleotide
gaaacaggaaaagacagaatg

SEQ ID NO: 30463 - DNA, 21 bp, Artificial Sequence
  Description of Artificial Sequence: Synthetic oligonucleotide
gaaacaggaagccacacaaca

SEQ ID NO: 30464 - DNA, 21 bp, Artificial Sequence
  Description of Artificial Sequence: Synthetic oligonucleotide
gaaacaggaagcagagcagtc

SEQ ID NO: 30465 - DNA, 21 bp, Artificial Sequence
  Description of Artificial Sequence: Synthetic oligonucleotide
gaaacaaaattcagcatggga

SEQ ID NO: 30466 - DNA, 21 bp, Artificial Sequence
  Description of Artificial Sequence: Synthetic oligonucleotide
gaaacaaaaggaagcgtcgca

SEQ ID NO: 30467 - DNA, 21 bp, Artificial Sequence
  Description of Artificial Sequence: Synthetic oligonucleotide
gaaacaaaaaaagactacagc

SEQ ID NO: 30468 - DNA, 21 bp, Artificial Sequence
  Description of Artificial Sequence: Synthetic oligonucleotide
gaaacactcgaagtcagcctc

SEQ ID NO: 30469 - DNA, 21 bp, Artificial Sequence
  Description of Artificial Sequence: Synthetic oligonucleotide
gaaacactcagcggaaacgaa

SEQ ID NO: 30470 - DNA, 21 bp, Artificial Sequence
  Description of Artificial Sequence: Synthetic oligonucleotide
gaaacaatgagaaaagaccca

SEQ ID NO: 30471 - DNA, 21 bp, Artificial Sequence
  Description of Artificial Sequence: Synthetic oligonucleotide
gaaacaaacttcagcggagca

SEQ ID NO: 30472 - DNA, 21 bp, Artificial Sequence
  Description of Artificial Sequence: Synthetic oligonucleotide
gaaacaaacccaagatgcagc

SEQ ID NO: 30473 - DNA, 21 bp, Artificial Sequence
  Description of Artificial Sequence: Synthetic oligonucleotide
gaaacaccattcaaaccaagc

SEQ ID NO: 30474 - DNA, 21 bp, Artificial Sequence
  Description of Artificial Sequence: Synthetic oligonucleotide
gaaacaccaatcgacagcgac

SEQ ID NO: 30475 - DNA, 21 bp, Artificial Sequence
  Description of Artificial Sequence: Synthetic oligonucleotide
gaaacaccaaaccacagcaga

SEQ ID NO: 30476 - DNA, 21 bp, Artificial Sequence
  Description of Artificial Sequence: Synthetic oligonucleotide
gaaacaagaggacacctcatc

SEQ ID NO: 30477 - DNA, 21 bp, Artificial Sequence
  Description of Artificial Sequence: Synthetic oligonucleotide
gaaacaagactcgtcccaaca

SEQ ID NO: 30478 - DNA, 21 bp, Artificial Sequence
  Description of Artificial Sequence: Synthetic oligonucleotide
gaaacaagaaacctccacgga

SEQ ID NO: 30479 - DNA, 21 bp, Artificial Sequence
  Description of Artificial Sequence: Synthetic oligonucleotide
gaaacaagaaaccaattcgga

SEQ ID NO: 30480 - DNA, 21 bp, Artificial Sequence
  Description of Artificial Sequence: Synthetic oligonucleotide
gaaacaagaagcacaagagaa

SEQ ID NO: 30481 - DNA, 21 bp, Artificial Sequence
  Description of Artificial Sequence: Synthetic oligonucleotide
gaaacaagatacccagacatg

SEQ ID NO: 30482 - DNA, 21 bp, Artificial Sequence
  Description of Artificial Sequence: Synthetic oligonucleotide
gaaacaagccacagcgtcagc

SEQ ID NO: 30483 - DNA, 21 bp, Artificial Sequence
  Description of Artificial Sequence: Synthetic oligonucleotide
gaaacaagcagagcaagcaca

SEQ ID NO: 30484 - DNA, 21 bp, Artificial Sequence
  Description of Artificial Sequence: Synthetic oligonucleotide
gaaacaagcagaccaacagtc

SEQ ID NO: 30485 - DNA, 21 bp, Artificial Sequence
  Description of Artificial Sequence: Synthetic oligonucleotide
gaaacaagcagcgcatacctc

SEQ ID NO: 30486 - DNA, 21 bp, Artificial Sequence
  Description of Artificial Sequence: Synthetic oligonucleotide
gaaacaacacaaaactacatc

SEQ ID NO: 30487 - DNA, 21 bp, Artificial Sequence
  Description of Artificial Sequence: Synthetic oligonucleotide
gaaacaacaagcctcccaaga

SEQ ID NO: 30488 - DNA, 21 bp, Artificial Sequence
  Description of Artificial Sequence: Synthetic oligonucleotide
gaaacaacagtccaagcaagc

SEQ ID NO: 30489 - DNA, 21 bp, Artificial Sequence
  Description of Artificial Sequence: Synthetic oligonucleotide
gaaacagtcttccacgtcgca

SEQ ID NO: 30490 - DNA, 21 bp, Artificial Sequence
  Description of Artificial Sequence: Synthetic oligonucleotide
gaagtcgcagtccaaccaatg

SEQ ID NO: 30491 - DNA, 21 bp, Artificial Sequence
  Description of Artificial Sequence: Synthetic oligonucleotide
gaagtcggaagaaacagcaca

SEQ ID NO: 30492 - DNA, 21 bp, Artificial Sequence
  Description of Artificial Sequence: Synthetic oligonucleotide
gaagtccacccaggacaagca

SEQ ID NO: 30493 - DNA, 21 bp, Artificial Sequence
  Description of Artificial Sequence: Synthetic oligonucleotide
gaagtcaaagaacaaacagtc

SEQ ID NO: 30494 - DNA, 21 bp, Artificial Sequence
  Description of Artificial Sequence: Synthetic oligonucleotide
gaagtcaaaagcttcagcagc

SEQ ID NO: 30495 - DNA, 21 bp, Artificial Sequence
  Description of Artificial Sequence: Synthetic oligonucleotide
gaagtcccagcagcaagaagc

SEQ ID NO: 30496 - DNA, 21 bp, Artificial Sequence
  Description of Artificial Sequence: Synthetic oligonucleotide
gaagtcccaaacagcagcgca

SEQ ID NO: 30497 - DNA, 21 bp, Artificial Sequence
  Description of Artificial Sequence: Synthetic oligonucleotide
gaagtccaactcccagcaaga

SEQ ID NO: 30498 - DNA, 21 bp, Artificial Sequence
  Description of Artificial Sequence: Synthetic oligonucleotide
gaagtcagaaaaggagcacaa

SEQ ID NO: 30499 - DNA, 21 bp, Artificial Sequence
  Description of Artificial Sequence: Synthetic oligonucleotide
gaagtcagactcagcaacgca

SEQ ID NO: 30500 - DNA, 21 bp, Artificial Sequence
  Description of Artificial Sequence: Synthetic oligonucleotide
gaagtcagcttcctcccacca

SEQ ID NO: 30501 - DNA, 21 bp, Artificial Sequence
  Description of Artificial Sequence: Synthetic oligonucleotide
gaagtcagcctcagcacaaga

SEQ ID NO: 30502 - DNA, 21 bp, Artificial Sequence
  Description of Artificial Sequence: Synthetic oligonucleotide
gaagtcagcatgctcagcaaa

SEQ ID NO: 30503 - DNA, 21 bp, Artificial Sequence
  Description of Artificial Sequence: Synthetic oligonucleotide
gaagtcacaggaagagcagga

SEQ ID NO: 30504 - DNA, 21 bp, Artificial Sequence
  Description of Artificial Sequence: Synthetic oligonucleotide
gaagtcacaatgaaacacaca

SEQ ID NO: 30505 - DNA, 21 bp, Artificial Sequence
  Description of Artificial Sequence: Synthetic oligonucleotide
gaagtcacaaacccaagcgca

SEQ ID NO: 30506 - DNA, 21 bp, Artificial Sequence
  Description of Artificial Sequence: Synthetic oligonucleotide
gaagtcacagtcggactccca

SEQ ID NO: 30507 - DNA, 21 bp, Artificial Sequence
  Description of Artificial Sequence: Synthetic oligonucleotide
gaatgggcagacagcagcgga

SEQ ID NO: 30508 - DNA, 21 bp, Artificial Sequence
  Description of Artificial Sequence: Synthetic oligonucleotide
gaatggaacagacaagcaaac

SEQ ID NO: 30509 - DNA, 21 bp, Artificial Sequence
  Description of Artificial Sequence: Synthetic oligonucleotide
gaatacgcaagcctcggactc

SEQ ID NO: 30510 - DNA, 21 bp, Artificial Sequence
  Description of Artificial Sequence: Synthetic oligonucleotide
gaatacgaccacagcatgctc

SEQ ID NO: 30511 - DNA, 21 bp, Artificial Sequence
  Description of Artificial Sequence: Synthetic oligonucleotide
gaatacatcagaggaaaagaa

SEQ ID NO: 30512 - DNA, 21 bp, Artificial Sequence
  Description of Artificial Sequence: Synthetic oligonucleotide
gaatacctcgacgaaagcgga

SEQ ID NO: 30513 - DNA, 21 bp, Artificial Sequence
  Description of Artificial Sequence: Synthetic oligonucleotide
gaatacctcccaaacagcgca

SEQ ID NO: 30514 - DNA, 21 bp, Artificial Sequence
  Description of Artificial Sequence: Synthetic oligonucleotide
gaatacccagcacacctcaca

SEQ ID NO: 30515 - DNA, 21 bp, Artificial Sequence
  Description of Artificial Sequence: Synthetic oligonucleotide
gaatacccactcaacacagga

SEQ ID NO: 30516 - DNA, 21 bp, Artificial Sequence
  Description of Artificial Sequence: Synthetic oligonucleotide
gaataccaaagaccagaccca

SEQ ID NO: 30517 - DNA, 21 bp, Artificial Sequence
  Description of Artificial Sequence: Synthetic oligonucleotide
gaatacagcttcccaaaagaa

SEQ ID NO: 30518 - DNA, 21 bp, Artificial Sequence
  Description of Artificial Sequence: Synthetic oligonucleotide
gaatacacaccaatcagcgga

SEQ ID NO: 30519 - DNA, 21 bp, Artificial Sequence
  Description of Artificial Sequence: Synthetic oligonucleotide
gaatacgtcggagtccaaaga

SEQ ID NO: 30520 - DNA, 21 bp, Artificial Sequence
  Description of Artificial Sequence: Synthetic oligonucleotide
ttcgcagcaaaagacgtcaca

SEQ ID NO: 30521 - DNA, 21 bp, Artificial Sequence
  Description of Artificial Sequence: Synthetic oligonucleotide
ttcgcagcaaaaatgccaagc

SEQ ID NO: 30522 - DNA, 21 bp, Artificial Sequence
  Description of Artificial Sequence: Synthetic oligonucleotide
ttcgcagcactcagagtcgac

SEQ ID NO: 30523 - DNA, 21 bp, Artificial Sequence
  Description of Artificial Sequence: Synthetic oligonucleotide
ttcgcagcacaagtcgaagac

SEQ ID NO: 30524 - DNA, 21 bp, Artificial Sequence
  Description of Artificial Sequence: Synthetic oligonucleotide
ttcgcagcaagcagccaagac

SEQ ID NO: 30525 - DNA, 21 bp, Artificial Sequence
  Description of Artificial Sequence: Synthetic oligonucleotide
ttcgcagacgcaatggtcatg

SEQ ID NO: 30526 - DNA, 21 bp, Artificial Sequence
  Description of Artificial Sequence: Synthetic oligonucleotide
ttcgcagaaaaaagcagagga

SEQ ID NO: 30527 - DNA, 21 bp, Artificial Sequence
  Description of Artificial Sequence: Synthetic oligonucleotide
ttcgcaggaatcgcacaatac

SEQ ID NO: 30528 - DNA, 21 bp, Artificial Sequence
  Description of Artificial Sequence: Synthetic oligonucleotide
ttcgcaggaaaacaccaaaac

SEQ ID NO: 30529 - DNA, 21 bp, Artificial Sequence
  Description of Artificial Sequence: Synthetic oligonucleotide
ttcgcaggactcacaccagtc

SEQ ID NO: 30530 - DNA, 21 bp, Artificial Sequence
  Description of Artificial Sequence: Synthetic oligonucleotide
ttcgcaggaaacagcccaagc

SEQ ID NO: 30531 - DNA, 21 bp, Artificial Sequence
  Description of Artificial Sequence: Synthetic oligonucleotide
ttcgcacacacagcaagacca

SEQ ID NO: 30532 - DNA, 21 bp, Artificial Sequence
  Description of Artificial Sequence: Synthetic oligonucleotide
ttcgcaaaacacggaggacca

SEQ ID NO: 30533 - DNA, 21 bp, Artificial Sequence
  Description of Artificial Sequence: Synthetic oligonucleotide
ttcgcaaaaccagcaagcctc

SEQ ID NO: 30534 - DNA, 21 bp, Artificial Sequence
  Description of Artificial Sequence: Synthetic oligonucleotide
ttcgcactcgaaggaagaagc

SEQ ID NO: 30535 - DNA, 21 bp, Artificial Sequence
  Description of Artificial Sequence: Synthetic oligonucleotide
ttcgcactcagcgcaagcctc

SEQ ID NO: 30536 - DNA, 21 bp, Artificial Sequence
  Description of Artificial Sequence: Synthetic oligonucleotide
ttcgcaatggcaaacgacaaa

SEQ ID NO: 30537 - DNA, 21 bp, Artificial Sequence
  Description of Artificial Sequence: Synthetic oligonucleotide
ttcgcaaacagagcaacaatc

SEQ ID NO: 30538 - DNA, 21 bp, Artificial Sequence
  Description of Artificial Sequence: Synthetic oligonucleotide
ttcgcaaacagcgcagtcgaa

SEQ ID NO: 30539 - DNA, 21 bp, Artificial Sequence
  Description of Artificial Sequence: Synthetic oligonucleotide
ttcgcaccaggacacgcaatc

SEQ ID NO: 30540 - DNA, 21 bp, Artificial Sequence
  Description of Artificial Sequence: Synthetic oligonucleotide
ttcgcaccactcagcccacac

SEQ ID NO: 30541 - DNA, 21 bp, Artificial Sequence
  Description of Artificial Sequence: Synthetic oligonucleotide
ttcgcaccaccaccagcattc

SEQ ID NO: 30542 - DNA, 21 bp, Artificial Sequence
  Description of Artificial Sequence: Synthetic oligonucleotide
ttcgcaccaagcagaaacgac

SEQ ID NO: 30543 - DNA, 21 bp, Artificial Sequence
  Description of Artificial Sequence: Synthetic oligonucleotide
ttcgcacaaaaactcagccca

SEQ ID NO: 30544 - DNA, 21 bp, Artificial Sequence
  Description of Artificial Sequence: Synthetic oligonucleotide
ttcgcacaaaaaaacctcagc

SEQ ID NO: 30545 - DNA, 21 bp, Artificial Sequence
  Description of Artificial Sequence: Synthetic oligonucleotide
ttcgcaagaaacccagacgca

SEQ ID NO: 30546 - DNA, 21 bp, Artificial Sequence
  Description of Artificial Sequence: Synthetic oligonucleotide
ttcgcaagaccagacagcatg

SEQ ID NO: 30547 - DNA, 21 bp, Artificial Sequence
  Description of Artificial Sequence: Synthetic oligonucleotide
ttcgcaagaagcagcatccca

SEQ ID NO: 30548 - DNA, 21 bp, Artificial Sequence
  Description of Artificial Sequence: Synthetic oligonucleotide
ttcgcaagcgcagcaccaaga

SEQ ID NO: 30549 - DNA, 21 bp, Artificial Sequence
  Description of Artificial Sequence: Synthetic oligonucleotide
ttcgcaagcgcaagagcacaa

SEQ ID NO: 30550 - DNA, 21 bp, Artificial Sequence
  Description of Artificial Sequence: Synthetic oligonucleotide
ttcgcaagcggacacttcaac

SEQ ID NO: 30551 - DNA, 21 bp, Artificial Sequence
  Description of Artificial Sequence: Synthetic oligonucleotide
ttcgcaagcctcgtcacaaac

SEQ ID NO: 30552 - DNA, 21 bp, Artificial Sequence
  Description of Artificial Sequence: Synthetic oligonucleotide
ttcgcaagcagcagaaacaac

SEQ ID NO: 30553 - DNA, 21 bp, Artificial Sequence
  Description of Artificial Sequence: Synthetic oligonucleotide
ttcgcaagcagcagcagccac

SEQ ID NO: 30554 - DNA, 21 bp, Artificial Sequence
  Description of Artificial Sequence: Synthetic oligonucleotide
ttcgcaagcgtcagaacagtc

SEQ ID NO: 30555 - DNA, 21 bp, Artificial Sequence
  Description of Artificial Sequence: Synthetic oligonucleotide
ttcgcaagctacggaagccca

SEQ ID NO: 30556 - DNA, 21 bp, Artificial Sequence
  Description of Artificial Sequence: Synthetic oligonucleotide
ttcgcaacaagcggatacgca

SEQ ID NO: 30557 - DNA, 21 bp, Artificial Sequence
  Description of Artificial Sequence: Synthetic oligonucleotide
ttcgcaacaagcacaacacca

SEQ ID NO: 30558 - DNA, 21 bp, Artificial Sequence
  Description of Artificial Sequence: Synthetic oligonucleotide
ttcgcaacaacaaaactcgac

SEQ ID NO: 30559 - DNA, 21 bp, Artificial Sequence
  Description of Artificial Sequence: Synthetic oligonucleotide
ttctgcagcgaacaacacagc

SEQ ID NO: 30560 - DNA, 21 bp, Artificial Sequence
  Description of Artificial Sequence: Synthetic oligonucleotide
ttcgacgcaccacaaacaaga

SEQ ID NO: 30561 - DNA, 21 bp, Artificial Sequence
  Description of Artificial Sequence: Synthetic oligonucleotide
ttcgacgcataccacagactc

SEQ ID NO: 30562 - DNA, 21 bp, Artificial Sequence
  Description of Artificial Sequence: Synthetic oligonucleotide
ttcgacgacttcgcactcgac

SEQ ID NO: 30563 - DNA, 21 bp, Artificial Sequence
  Description of Artificial Sequence: Synthetic oligonucleotide
ttcgacgaagcacacgcacca

SEQ ID NO: 30564 - DNA, 21 bp, Artificial Sequence
  Description of Artificial Sequence: Synthetic oligonucleotide
ttcgacgaagacgacctcgca

SEQ ID NO: 30565 - DNA, 21 bp, Artificial Sequence
  Description of Artificial Sequence: Synthetic oligonucleotide
ttcgacggagcaagaagcgaa

SEQ ID NO: 30566 - DNA, 21 bp, Artificial Sequence
  Description of Artificial Sequence: Synthetic oligonucleotide
ttcgacggaatcagaccaaca

SEQ ID NO: 30567 - DNA, 21 bp, Artificial Sequence
  Description of Artificial Sequence: Synthetic oligonucleotide
ttcgaccacccaagcttccca

SEQ ID NO: 30568 - DNA, 21 bp, Artificial Sequence
  Description of Artificial Sequence: Synthetic oligonucleotide
ttcgaccacccagtcagaatg

SEQ ID NO: 30569 - DNA, 21 bp, Artificial Sequence
  Description of Artificial Sequence: Synthetic oligonucleotide
ttcgaccacacaaaagcatgg

SEQ ID NO: 30570 - DNA, 21 bp, Artificial Sequence
  Description of Artificial Sequence: Synthetic oligonucleotide
ttcgacaaaagcacaaaatac

SEQ ID NO: 30571 - DNA, 21 bp, Artificial Sequence
  Description of Artificial Sequence: Synthetic oligonucleotide
ttcgaccaacacacaagaagc

SEQ ID NO: 30572 - DNA, 21 bp, Artificial Sequence
  Description of Artificial Sequence: Synthetic oligonucleotide
ttcgacagagcaatgcaaaga

SEQ ID NO: 30573 - DNA, 21 bp, Artificial Sequence
  Description of Artificial Sequence: Synthetic oligonucleotide
ttcgacagacaaacacaaatc

SEQ ID NO: 30574 - DNA, 21 bp, Artificial Sequence
  Description of Artificial Sequence: Synthetic oligonucleotide
ttcgacagcgtcagactcagc

SEQ ID NO: 30575 - DNA, 21 bp, Artificial Sequence
  Description of Artificial Sequence: Synthetic oligonucleotide
ttcgacacagcagtcaacgca

SEQ ID NO: 30576 - DNA, 21 bp, Artificial Sequence
  Description of Artificial Sequence: Synthetic oligonucleotide
ttcgacacaggaaaattcgca

SEQ ID NO: 30577 - DNA, 21 bp, Artificial Sequence
  Description of Artificial Sequence: Synthetic oligonucleotide
ttcgactacggaccaatggac

SEQ ID NO: 30578 - DNA, 21 bp, Artificial Sequence
  Description of Artificial Sequence: Synthetic oligonucleotide
ttcgaagcaaaaagcagcctc

SEQ ID NO: 30579 - DNA, 21 bp, Artificial Sequence
  Description of Artificial Sequence: Synthetic oligonucleotide
ttcgaagcaaaagtcacaaga

SEQ ID NO: 30580 - DNA, 21 bp, Artificial Sequence
  Description of Artificial Sequence: Synthetic oligonucleotide
ttcgaagcaagactcggaaca

SEQ ID NO: 30581 - DNA, 21 bp, Artificial Sequence
  Description of Artificial Sequence: Synthetic oligonucleotide
ttcgaagacggaagcctcgca

SEQ ID NO: 30582 - DNA, 21 bp, Artificial Sequence
  Description of Artificial Sequence: Synthetic oligonucleotide
ttcgaaggaagccaaccacca

SEQ ID NO: 30583 - DNA, 21 bp, Artificial Sequence
  Description of Artificial Sequence: Synthetic oligonucleotide
ttcgaaggagtccaaagcagc

SEQ ID NO: 30584 - DNA, 21 bp, Artificial Sequence
  Description of Artificial Sequence: Synthetic oligonucleotide
ttcgaacaccactacacacca

SEQ ID NO: 30585 - DNA, 21 bp, Artificial Sequence
  Description of Artificial Sequence: Synthetic oligonucleotide
ttcgaaaaaagactcacaatc

SEQ ID NO: 30586 - DNA, 21 bp, Artificial Sequence
  Description of Artificial Sequence: Synthetic oligonucleotide
ttcgaaaaaagcctcccagac

SEQ ID NO: 30587 - DNA, 21 bp, Artificial Sequence
  Description of Artificial Sequence: Synthetic oligonucleotide
ttcgaaatggtcagcagcctc

SEQ ID NO: 30588 - DNA, 21 bp, Artificial Sequence
  Description of Artificial Sequence: Synthetic oligonucleotide
ttcgaaaacaaataccacgtc

SEQ ID NO: 30589 - DNA, 21 bp, Artificial Sequence
  Description of Artificial Sequence: Synthetic oligonucleotide
ttcgaaccagcacacgcaagc

SEQ ID NO: 30590 - DNA, 21 bp, Artificial Sequence
  Description of Artificial Sequence: Synthetic oligonucleotide
ttcgaaccaagccaactcaga

SEQ ID NO: 30591 - DNA, 21 bp, Artificial Sequence
  Description of Artificial Sequence: Synthetic oligonucleotide
ttcgaaccagtccaaaacaca

SEQ ID NO: 30592 - DNA, 21 bp, Artificial Sequence
  Description of Artificial Sequence: Synthetic oligonucleotide
ttcgaacaactcctcgacttc

SEQ ID NO: 30593 - DNA, 21 bp, Artificial Sequence
  Description of Artificial Sequence: Synthetic oligonucleotide
ttcgaaagaaacagaacaagc

SEQ ID NO: 30594 - DNA, 21 bp, Artificial Sequence
  Description of Artificial Sequence: Synthetic oligonucleotide
ttcgaaagaccaacagtcatc

SEQ ID NO: 30595 - DNA, 21 bp, Artificial Sequence
  Description of Artificial Sequence: Synthetic oligonucleotide
ttcgaaagaagcagcggaaca

SEQ ID NO: 30596 - DNA, 21 bp, Artificial Sequence
  Description of Artificial Sequence: Synthetic oligonucleotide
ttcgaaagagtcccactcgac

SEQ ID NO: 30597 - DNA, 21 bp, Artificial Sequence
  Description of Artificial Sequence: Synthetic oligonucleotide
ttcgaaagcaacagcgtcctc

SEQ ID NO: 30598 - DNA, 21 bp, Artificial Sequence
  Description of Artificial Sequence: Synthetic oligonucleotide
ttcgaaagcacaacaagcgtc

SEQ ID NO: 30599 - DNA, 21 bp, Artificial Sequence
  Description of Artificial Sequence: Synthetic oligonucleotide
ttcgaaacaagatacgaagca

SEQ ID NO: 30600 - DNA, 21 bp, Artificial Sequence
  Description of Artificial Sequence: Synthetic oligonucleotide
ttcgaaacaacaatcagactc

SEQ ID NO: 30601 - DNA, 21 bp, Artificial Sequence
  Description of Artificial Sequence: Synthetic oligonucleotide
ttcgaagtcccaagcacaaga

SEQ ID NO: 30602 - DNA, 21 bp, Artificial Sequence
  Description of Artificial Sequence: Synthetic oligonucleotide
ttcgaataccacgcaagcgga

SEQ ID NO: 30603 - DNA, 21 bp, Artificial Sequence
  Description of Artificial Sequence: Synthetic oligonucleotide
ttcttcggaccaggaccaaca

SEQ ID NO: 30604 - DNA, 21 bp, Artificial Sequence
  Description of Artificial Sequence: Synthetic oligonucleotide
ttcttcccaatcacaagcgca

SEQ ID NO: 30605 - DNA, 21 bp, Artificial Sequence
  Description of Artificial Sequence: Synthetic oligonucleotide
ttcttcagcgacggaagagtc

SEQ ID NO: 30606 - DNA, 21 bp, Artificial Sequence
  Description of Artificial Sequence: Synthetic oligonucleotide
ttcggagcatgcagagtcagc

SEQ ID NO: 30607 - DNA, 21 bp, Artificial Sequence
  Description of Artificial Sequence: Synthetic oligonucleotide
ttcggagcagaaccagacgca

SEQ ID NO: 30608 - DNA, 21 bp, Artificial Sequence
  Description of Artificial Sequence: Synthetic oligonucleotide
ttcggagacagaccattccca

SEQ ID NO: 30609 - DNA, 21 bp, Artificial Sequence
  Description of Artificial Sequence: Synthetic oligonucleotide
ttcggaggaggaagaccagaa

SEQ ID NO: 30610 - DNA, 21 bp, Artificial Sequence
  Description of Artificial Sequence: Synthetic oligonucleotide
ttcggaggacaaggaggacaa

SEQ ID NO: 30611 - DNA, 21 bp, Artificial Sequence
  Description of Artificial Sequence: Synthetic oligonucleotide
ttcggaggaacaggacaattc

SEQ ID NO: 30612 - DNA, 21 bp, Artificial Sequence
  Description of Artificial Sequence: Synthetic oligonucleotide
ttcggacacatgaaaacacca

SEQ ID NO: 30613 - DNA, 21 bp, Artificial Sequence
  Description of Artificial Sequence: Synthetic oligonucleotide
ttcggacacccaatcgcaagc

SEQ ID NO: 30614 - DNA, 21 bp, Artificial Sequence
  Description of Artificial Sequence: Synthetic oligonucleotide
ttcggacacgtccacctcaac

SEQ ID NO: 30615 - DNA, 21 bp, Artificial Sequence
  Description of Artificial Sequence: Synthetic oligonucleotide
ttcggaatcgcaggaagccca

SEQ ID NO: 30616 - DNA, 21 bp, Artificial Sequence
  Description of Artificial Sequence: Synthetic oligonucleotide
ttcggaaaaatcagcatgaca

SEQ ID NO: 30617 - DNA, 21 bp, Artificial Sequence
  Description of Artificial Sequence: Synthetic oligonucleotide
ttcggactcagcccactccca

SEQ ID NO: 30618 - DNA, 21 bp, Artificial Sequence
  Description of Artificial Sequence: Synthetic oligonucleotide
ttcggactcagcagcgcagca

SEQ ID NO: 30619 - DNA, 21 bp, Artificial Sequence
  Description of Artificial Sequence: Synthetic oligonucleotide
ttcggactcacaagaccagaa

SEQ ID NO: 30620 - DNA, 21 bp, Artificial Sequence
  Description of Artificial Sequence: Synthetic oligonucleotide
ttcggaaacagactcagcaac

SEQ ID NO: 30621 - DNA, 21 bp, Artificial Sequence
  Description of Artificial Sequence: Synthetic oligonucleotide
ttcggaccaatgctcctcgga

SEQ ID NO: 30622 - DNA, 21 bp, Artificial Sequence
  Description of Artificial Sequence: Synthetic oligonucleotide
ttcggaccaaacaaagcagac

SEQ ID NO: 30623 - DNA, 21 bp, Artificial Sequence
  Description of Artificial Sequence: Synthetic oligonucleotide
ttcggaccaccaagcggattc

SEQ ID NO: 30624 - DNA, 21 bp, Artificial Sequence
  Description of Artificial Sequence: Synthetic oligonucleotide
ttcggacaacacgcagtcctc

SEQ ID NO: 30625 - DNA, 21 bp, Artificial Sequence
  Description of Artificial Sequence: Synthetic oligonucleotide
ttcggacaaaaacacacagaa

SEQ ID NO: 30626 - DNA, 21 bp, Artificial Sequence
  Description of Artificial Sequence: Synthetic oligonucleotide
ttcggacaaaacagagtcaca

SEQ ID NO: 30627 - DNA, 21 bp, Artificial Sequence
  Description of Artificial Sequence: Synthetic oligonucleotide
ttcggacaaacagcactcgga

SEQ ID NO: 30628 - DNA, 21 bp, Artificial Sequence
  Description of Artificial Sequence: Synthetic oligonucleotide
ttcggaagattcccaacagaa

SEQ ID NO: 30629 - DNA, 21 bp, Artificial Sequence
  Description of Artificial Sequence: Synthetic oligonucleotide
ttcggaagaacaccatacagc

SEQ ID NO: 30630 - DNA, 21 bp, Artificial Sequence
  Description of Artificial Sequence: Synthetic oligonucleotide
ttcggaagcgacacactcatc

SEQ ID NO: 30631 - DNA, 21 bp, Artificial Sequence
  Description of Artificial Sequence: Synthetic oligonucleotide
ttcggaagccacggagaaaga

SEQ ID NO: 30632 - DNA, 21 bp, Artificial Sequence
  Description of Artificial Sequence: Synthetic oligonucleotide
ttcggaacaggatacgcagga

SEQ ID NO: 30633 - DNA, 21 bp, Artificial Sequence
  Description of Artificial Sequence: Synthetic oligonucleotide
ttcggaacaagaatggaacca

SEQ ID NO: 30634 - DNA, 21 bp, Artificial Sequence
  Description of Artificial Sequence: Synthetic oligonucleotide
ttcggaacaagcgaagacgtc

SEQ ID NO: 30635 - DNA, 21 bp, Artificial Sequence
  Description of Artificial Sequence: Synthetic oligonucleotide
ttcggaacaacaagaatggca

SEQ ID NO: 30636 - DNA, 21 bp, Artificial Sequence
  Description of Artificial Sequence: Synthetic oligonucleotide
ttcggaacagtcagaccaagc

SEQ ID NO: 30637 - DNA, 21 bp, Artificial Sequence
  Description of Artificial Sequence: Synthetic oligonucleotide
ttcggagtccaaaaaatcaca

SEQ ID NO: 30638 - DNA, 21 bp, Artificial Sequence
  Description of Artificial Sequence: Synthetic oligonucleotide
ttccacgcaagccacctcgga

SEQ ID NO: 30639 - DNA, 21 bp, Artificial Sequence
  Description of Artificial Sequence: Synthetic oligonucleotide
ttccacgacccatacatctgg

SEQ ID NO: 30640 - DNA, 21 bp, Artificial Sequence
  Description of Artificial Sequence: Synthetic oligonucleotide
ttccacggactcacagtcgca

SEQ ID NO: 30641 - DNA, 21 bp, Artificial Sequence
  Description of Artificial Sequence: Synthetic oligonucleotide
ttccacggaacaagcctcgga

SEQ ID NO: 30642 - DNA, 21 bp, Artificial Sequence
  Description of Artificial Sequence: Synthetic oligonucleotide
ttccacctcccaccagaactc

SEQ ID NO: 30643 - DNA, 21 bp, Artificial Sequence
  Description of Artificial Sequence: Synthetic oligonucleotide
ttccacctcagcagcgcaagc

SEQ ID NO: 30644 - DNA, 21 bp, Artificial Sequence
  Description of Artificial Sequence: Synthetic oligonucleotide
ttccacccagcaagcgtcaac

SEQ ID NO: 30645 - DNA, 21 bp, Artificial Sequence
  Description of Artificial Sequence: Synthetic oligonucleotide
ttccacccacacagcccacca

SEQ ID NO: 30646 - DNA, 21 bp, Artificial Sequence
  Description of Artificial Sequence: Synthetic oligonucleotide
ttccaccaaagaagccaaagc

SEQ ID NO: 30647 - DNA, 21 bp, Artificial Sequence
  Description of Artificial Sequence: Synthetic oligonucleotide
ttccacagaaacgtcgcaaac

SEQ ID NO: 30648 - DNA, 21 bp, Artificial Sequence
  Description of Artificial Sequence: Synthetic oligonucleotide
ttccacacagcaaacacagaa

SEQ ID NO: 30649 - DNA, 21 bp, Artificial Sequence
  Description of Artificial Sequence: Synthetic oligonucleotide
ttcatcgaccacagcatcgca

SEQ ID NO: 30650 - DNA, 21 bp, Artificial Sequence
  Description of Artificial Sequence: Synthetic oligonucleotide
ttcatcggaaacgcaacacaa

SEQ ID NO: 30651 - DNA, 21 bp, Artificial Sequence
  Description of Artificial Sequence: Synthetic oligonucleotide
ttcatcggaacagcaagccaa

SEQ ID NO: 30652 - DNA, 21 bp, Artificial Sequence
  Description of Artificial Sequence: Synthetic oligonucleotide
ttcatcggatacccacaagga

SEQ ID NO: 30653 - DNA, 21 bp, Artificial Sequence
  Description of Artificial Sequence: Synthetic oligonucleotide
ttcatcccaagcgtcagcgtc

SEQ ID NO: 30654 - DNA, 21 bp, Artificial Sequence
  Description of Artificial Sequence: Synthetic oligonucleotide
ttcatccaagacaaacacgtc

SEQ ID NO: 30655 - DNA, 21 bp, Artificial Sequence
  Description of Artificial Sequence: Synthetic oligonucleotide
ttcatcagacacgaaagcgtc

SEQ ID NO: 30656 - DNA, 21 bp, Artificial Sequence
  Description of Artificial Sequence: Synthetic oligonucleotide
ttcatcagaccagacctcgac

SEQ ID NO: 30657 - DNA, 21 bp, Artificial Sequence
  Description of Artificial Sequence: Synthetic oligonucleotide
ttcatcacaggagcactcgga

SEQ ID NO: 30658 - DNA, 21 bp, Artificial Sequence
  Description of Artificial Sequence: Synthetic oligonucleotide
ttcaaagcatacgacaacatc

SEQ ID NO: 30659 - DNA, 21 bp, Artificial Sequence
  Description of Artificial Sequence: Synthetic oligonucleotide
ttcaaagactggttcgaagac

SEQ ID NO: 30660 - DNA, 21 bp, Artificial Sequence
  Description of Artificial Sequence: Synthetic oligonucleotide
ttcaaagaaagctggccagca

SEQ ID NO: 30661 - DNA, 21 bp, Artificial Sequence
  Description of Artificial Sequence: Synthetic oligonucleotide
ttcaaagaaacaagcaaccac

SEQ ID NO: 30662 - DNA, 21 bp, Artificial Sequence
  Description of Artificial Sequence: Synthetic oligonucleotide
ttcaaaggaatgggagtcgga

SEQ ID NO: 30663 - DNA, 21 bp, Artificial Sequence
  Description of Artificial Sequence: Synthetic oligonucleotide
ttcaaacacccaatggacgga

SEQ ID NO: 30664 - DNA, 21 bp, Artificial Sequence
  Description of Artificial Sequence: Synthetic oligonucleotide
ttcaaactcggaccaccagaa

SEQ ID NO: 30665 - DNA, 21 bp, Artificial Sequence
  Description of Artificial Sequence: Synthetic oligonucleotide
ttcaaactcgtcacaagagaa

SEQ ID NO: 30666 - DNA, 21 bp, Artificial Sequence
  Description of Artificial Sequence: Synthetic oligonucleotide
ttcaaaaacggaacaccacca

SEQ ID NO: 30667 - DNA, 21 bp, Artificial Sequence
  Description of Artificial Sequence: Synthetic oligonucleotide
ttcaaaaacgtcctcggaaca

SEQ ID NO: 30668 - DNA, 21 bp, Artificial Sequence
  Description of Artificial Sequence: Synthetic oligonucleotide
ttcaaaccagcaaacaacgtc

SEQ ID NO: 30669 - DNA, 21 bp, Artificial Sequence
  Description of Artificial Sequence: Synthetic oligonucleotide
ttcaaaccaccaccaatgagc

SEQ ID NO: 30670 - DNA, 21 bp, Artificial Sequence
  Description of Artificial Sequence: Synthetic oligonucleotide
ttcaaacaaccaccatacgtc

SEQ ID NO: 30671 - DNA, 21 bp, Artificial Sequence
  Description of Artificial Sequence: Synthetic oligonucleotide
ttcaaacaaccatacgcaaga

SEQ ID NO: 30672 - DNA, 21 bp, Artificial Sequence
  Description of Artificial Sequence: Synthetic oligonucleotide
ttcaaaagcgtcggaacaatc

SEQ ID NO: 30673 - DNA, 21 bp, Artificial Sequence
  Description of Artificial Sequence: Synthetic oligonucleotide
ttcaaaacaatggaaagactc

SEQ ID NO: 30674 - DNA, 21 bp, Artificial Sequence
  Description of Artificial Sequence: Synthetic oligonucleotide
ttcaaagtccacgcaagcagc

SEQ ID NO: 30675 - DNA, 21 bp, Artificial Sequence
  Description of Artificial Sequence: Synthetic oligonucleotide
ttcctcgcaaaactccaacca

SEQ ID NO: 30676 - DNA, 21 bp, Artificial Sequence
  Description of Artificial Sequence: Synthetic oligonucleotide
ttcctcgcactcgaaagacaa

SEQ ID NO: 30677 - DNA, 21 bp, Artificial Sequence
  Description of Artificial Sequence: Synthetic oligonucleotide
ttcctcgcaagcctcaacgac

SEQ ID NO: 30678 - DNA, 21 bp, Artificial Sequence
  Description of Artificial Sequence: Synthetic oligonucleotide
ttcctcgacaacagagcagtc

SEQ ID NO: 30679 - DNA, 21 bp, Artificial Sequence
  Description of Artificial Sequence: Synthetic oligonucleotide
ttcctcggagcagcaggacaa

SEQ ID NO: 30680 - DNA, 21 bp, Artificial Sequence
  Description of Artificial Sequence: Synthetic oligonucleotide
ttcctcggagcacacagcgca

SEQ ID NO: 30681 - DNA, 21 bp, Artificial Sequence
  Description of Artificial Sequence: Synthetic oligonucleotide
ttcctccacgcaatggacctc

SEQ ID NO: 30682 - DNA, 21 bp, Artificial Sequence
  Description of Artificial Sequence: Synthetic oligonucleotide
ttcctccacggagaaacagga

SEQ ID NO: 30683 - DNA, 21 bp, Artificial Sequence
  Description of Artificial Sequence: Synthetic oligonucleotide
ttcctcaaaagcaacatcgca

SEQ ID NO: 30684 - DNA, 21 bp, Artificial Sequence
  Description of Artificial Sequence: Synthetic oligonucleotide
ttcctcaaaacagcagtccca

SEQ ID NO: 30685 - DNA, 21 bp, Artificial Sequence
  Description of Artificial Sequence: Synthetic oligonucleotide
ttcctcaaaacagacacagga

SEQ ID NO: 30686 - DNA, 21 bp, Artificial Sequence
  Description of Artificial Sequence: Synthetic oligonucleotide
ttcctcccagaaagaggaagc

SEQ ID NO: 30687 - DNA, 21 bp, Artificial Sequence
  Description of Artificial Sequence: Synthetic oligonucleotide
ttcctcccacaacacagccca

SEQ ID NO: 30688 - DNA, 21 bp, Artificial Sequence
  Description of Artificial Sequence: Synthetic oligonucleotide
ttcctcccaagcggaggagca

SEQ ID NO: 30689 - DNA, 21 bp, Artificial Sequence
  Description of Artificial Sequence: Synthetic oligonucleotide
ttcctcagagaaaacgcaagc

SEQ ID NO: 30690 - DNA, 21 bp, Artificial Sequence
  Description of Artificial Sequence: Synthetic oligonucleotide
ttcctcagaatcccagacgac

SEQ ID NO: 30691 - DNA, 21 bp, Artificial Sequence
  Description of Artificial Sequence: Synthetic oligonucleotide
ttcctcagcaaaccactcagc

SEQ ID NO: 30692 - DNA, 21 bp, Artificial Sequence
  Description of Artificial Sequence: Synthetic oligonucleotide
ttcctcagcaacagcaacgca

SEQ ID NO: 30693 - DNA, 21 bp, Artificial Sequence
  Description of Artificial Sequence: Synthetic oligonucleotide
ttcctcagcccaaacctcatc

SEQ ID NO: 30694 - DNA, 21 bp, Artificial Sequence
  Description of Artificial Sequence: Synthetic oligonucleotide
ttcctcagcagcgacggaaga

SEQ ID NO: 30695 - DNA, 21 bp, Artificial Sequence
  Description of Artificial Sequence: Synthetic oligonucleotide
ttcctcagcgtcccagaaaca

SEQ ID NO: 30696 - DNA, 21 bp, Artificial Sequence
  Description of Artificial Sequence: Synthetic oligonucleotide
ttcctcacagcaggaatgcca

SEQ ID NO: 30697 - DNA, 21 bp, Artificial Sequence
  Description of Artificial Sequence: Synthetic oligonucleotide
ttcctcacaagcgcaaaaagc

SEQ ID NO: 30698 - DNA, 21 bp, Artificial Sequence
  Description of Artificial Sequence: Synthetic oligonucleotide
ttcctcacaacaggagtcgac

SEQ ID NO: 30699 - DNA, 21 bp, Artificial Sequence
  Description of Artificial Sequence: Synthetic oligonucleotide
ttcatgttcaacgacagccca

SEQ ID NO: 30700 - DNA, 21 bp, Artificial Sequence
  Description of Artificial Sequence: Synthetic oligonucleotide
ttcatgggaacagtcgtcaac

SEQ ID NO: 30701 - DNA, 21 bp, Artificial Sequence
  Description of Artificial Sequence: Synthetic oligonucleotide
ttcatgcaccaacaaggactc

SEQ ID NO: 30702 - DNA, 21 bp, Artificial Sequence
  Description of Artificial Sequence: Synthetic oligonucleotide
ttcatgctcagagacgcaaca

SEQ ID NO: 30703 - DNA, 21 bp, Artificial Sequence
  Description of Artificial Sequence: Synthetic oligonucleotide
ttcatgatgacaggaacagca

SEQ ID NO: 30704 - DNA, 21 bp, Artificial Sequence
  Description of Artificial Sequence: Synthetic oligonucleotide
ttcatgccaaaaacaagccca

SEQ ID NO: 30705 - DNA, 21 bp, Artificial Sequence
  Description of Artificial Sequence: Synthetic oligonucleotide
ttcatgagaagcacacaaagc

SEQ ID NO: 30706 - DNA, 21 bp, Artificial Sequence
  Description of Artificial Sequence: Synthetic oligonucleotide
ttcatgagcagaggactcgca

SEQ ID NO: 30707 - DNA, 21 bp, Artificial Sequence
  Description of Artificial Sequence: Synthetic oligonucleotide
ttcatgacagaaagagcagca

SEQ ID NO: 30708 - DNA, 21 bp, Artificial Sequence
  Description of Artificial Sequence: Synthetic oligonucleotide
ttcatgacaaacctcagcgga

SEQ ID NO: 30709 - DNA, 21 bp, Artificial Sequence
  Description of Artificial Sequence: Synthetic oligonucleotide
ttcatgacaagcggagacctc

SEQ ID NO: 30710 - DNA, 21 bp, Artificial Sequence
  Description of Artificial Sequence: Synthetic oligonucleotide
ttcatggtcgacccagtcaac

SEQ ID NO: 30711 - DNA, 21 bp, Artificial Sequence
  Description of Artificial Sequence: Synthetic oligonucleotide
ttcatggtcagcgcaccactc

SEQ ID NO: 30712 - DNA, 21 bp, Artificial Sequence
  Description of Artificial Sequence: Synthetic oligonucleotide
ttcatgtacggaaacggagtc

SEQ ID NO: 30713 - DNA, 21 bp, Artificial Sequence
  Description of Artificial Sequence: Synthetic oligonucleotide
ttcaacgcaatccacgtcagc

SEQ ID NO: 30714 - DNA, 21 bp, Artificial Sequence
  Description of Artificial Sequence: Synthetic oligonucleotide
ttcaacgaactcagcggactc

SEQ ID NO: 30715 - DNA, 21 bp, Artificial Sequence
  Description of Artificial Sequence: Synthetic oligonucleotide
ttcaacttcaacaaaatggac

SEQ ID NO: 30716 - DNA, 21 bp, Artificial Sequence
  Description of Artificial Sequence: Synthetic oligonucleotide
ttcaacggagacagcccagca

SEQ ID NO: 30717 - DNA, 21 bp, Artificial Sequence
  Description of Artificial Sequence: Synthetic oligonucleotide
ttcaacggaccatacgaactc

SEQ ID NO: 30718 - DNA, 21 bp, Artificial Sequence
  Description of Artificial Sequence: Synthetic oligonucleotide
ttcaacctcagcacaagcgca

SEQ ID NO: 30719 - DNA, 21 bp, Artificial Sequence
  Description of Artificial Sequence: Synthetic oligonucleotide
ttcaacccaacagtcagagaa

SEQ ID NO: 30720 - DNA, 21 bp, Artificial Sequence
  Description of Artificial Sequence: Synthetic oligonucleotide
ttcaacagaccagtcacaaca

SEQ ID NO: 30721 - DNA, 21 bp, Artificial Sequence
  Description of Artificial Sequence: Synthetic oligonucleotide
ttcaacagcgacagcaacagc

SEQ ID NO: 30722 - DNA, 21 bp, Artificial Sequence
  Description of Artificial Sequence: Synthetic oligonucleotide
ttcaacagcagcccagacctc

SEQ ID NO: 30723 - DNA, 21 bp, Artificial Sequence
  Description of Artificial Sequence: Synthetic oligonucleotide
ttcaacacaccaacaaaagtc

SEQ ID NO: 30724 - DNA, 21 bp, Artificial Sequence
  Description of Artificial Sequence: Synthetic oligonucleotide
ttcaacgtcatgcaagaaaga

SEQ ID NO: 30725 - DNA, 21 bp, Artificial Sequence
  Description of Artificial Sequence: Synthetic oligonucleotide
ttcccagcactcagcggagga

SEQ ID NO: 30726 - DNA, 21 bp, Artificial Sequence
  Description of Artificial Sequence: Synthetic oligonucleotide
ttcccagcagtcaacgtccca

SEQ ID NO: 30727 - DNA, 21 bp, Artificial Sequence
  Description of Artificial Sequence: Synthetic oligonucleotide
ttcccagaaagaggaatggtc

SEQ ID NO: 30728 - DNA, 21 bp, Artificial Sequence
  Description of Artificial Sequence: Synthetic oligonucleotide
ttcccattcaacagcggaagc

SEQ ID NO: 30729 - DNA, 21 bp, Artificial Sequence
  Description of Artificial Sequence: Synthetic oligonucleotide
ttcccaggattcccaagcaaa

SEQ ID NO: 30730 - DNA, 21 bp, Artificial Sequence
  Description of Artificial Sequence: Synthetic oligonucleotide
ttcccaggaagcgacagcctc

SEQ ID NO: 30731 - DNA, 21 bp, Artificial Sequence
  Description of Artificial Sequence: Synthetic oligonucleotide
ttcccacacacactcagcgaa

SEQ ID NO: 30732 - DNA, 21 bp, Artificial Sequence
  Description of Artificial Sequence: Synthetic oligonucleotide
ttcccaaaaggaagcacacca

SEQ ID NO: 30733 - DNA, 21 bp, Artificial Sequence
  Description of Artificial Sequence: Synthetic oligonucleotide
ttcccaaaaacagacgacaca

SEQ ID NO: 30734 - DNA, 21 bp, Artificial Sequence
  Description of Artificial Sequence: Synthetic oligonucleotide
ttcccaaaatacgcaatcgca

SEQ ID NO: 30735 - DNA, 21 bp, Artificial Sequence
  Description of Artificial Sequence: Synthetic oligonucleotide
ttcccactcatgagcagcaac

SEQ ID NO: 30736 - DNA, 21 bp, Artificial Sequence
  Description of Artificial Sequence: Synthetic oligonucleotide
ttcccactcagcgacccatac

SEQ ID NO: 30737 - DNA, 21 bp, Artificial Sequence
  Description of Artificial Sequence: Synthetic oligonucleotide
ttcccactcagccaacaagca

SEQ ID NO: 30738 - DNA, 21 bp, Artificial Sequence
  Description of Artificial Sequence: Synthetic oligonucleotide
ttcccaatggcaaaaccatac

SEQ ID NO: 30739 - DNA, 21 bp, Artificial Sequence
  Description of Artificial Sequence: Synthetic oligonucleotide
ttcccaatgagaggagcacca

SEQ ID NO: 30740 - DNA, 21 bp, Artificial Sequence
  Description of Artificial Sequence: Synthetic oligonucleotide
ttcccaatgacaaacccagca

SEQ ID NO: 30741 - DNA, 21 bp, Artificial Sequence
  Description of Artificial Sequence: Synthetic oligonucleotide
ttcccaaacgcacaactcgtc

SEQ ID NO: 30742 - DNA, 21 bp, Artificial Sequence
  Description of Artificial Sequence: Synthetic oligonucleotide
ttcccaaacgacctcccactc

SEQ ID NO: 30743 - DNA, 21 bp, Artificial Sequence
  Description of Artificial Sequence: Synthetic oligonucleotide
ttcccaaacatgagcagcgtc

SEQ ID NO: 30744 - DNA, 21 bp, Artificial Sequence
  Description of Artificial Sequence: Synthetic oligonucleotide
ttcccaaacagattcgaagca

SEQ ID NO: 30745 - DNA, 21 bp, Artificial Sequence
  Description of Artificial Sequence: Synthetic oligonucleotide
ttcccaccaggagtcagacca

SEQ ID NO: 30746 - DNA, 21 bp, Artificial Sequence
  Description of Artificial Sequence: Synthetic oligonucleotide
ttcccaccaagagacacacca

SEQ ID NO: 30747 - DNA, 21 bp, Artificial Sequence
  Description of Artificial Sequence: Synthetic oligonucleotide
ttcccaccaagctgcgcaaac

SEQ ID NO: 30748 - DNA, 21 bp, Artificial Sequence
  Description of Artificial Sequence: Synthetic oligonucleotide
ttcccaccaagcctcagcgca

SEQ ID NO: 30749 - DNA, 21 bp, Artificial Sequence
  Description of Artificial Sequence: Synthetic oligonucleotide
ttcccaccaagcagcctccca

SEQ ID NO: 30750 - DNA, 21 bp, Artificial Sequence
  Description of Artificial Sequence: Synthetic oligonucleotide
ttcccaccaacaaacagcttc

SEQ ID NO: 30751 - DNA, 21 bp, Artificial Sequence
  Description of Artificial Sequence: Synthetic oligonucleotide
ttcccacaaatcacactcaac

SEQ ID NO: 30752 - DNA, 21 bp, Artificial Sequence
  Description of Artificial Sequence: Synthetic oligonucleotide
ttcccacaaaaagaaggaaca

SEQ ID NO: 30753 - DNA, 21 bp, Artificial Sequence
  Description of Artificial Sequence: Synthetic oligonucleotide
ttcccacaaccagcagacatg

SEQ ID NO: 30754 - DNA, 21 bp, Artificial Sequence
  Description of Artificial Sequence: Synthetic oligonucleotide
ttcccaagagcaatcgacgca

SEQ ID NO: 30755 - DNA, 21 bp, Artificial Sequence
  Description of Artificial Sequence: Synthetic oligonucleotide
ttcccaagaggagcagtcctc

SEQ ID NO: 30756 - DNA, 21 bp, Artificial Sequence
  Description of Artificial Sequence: Synthetic oligonucleotide
ttcccaagaccacaactcgga

SEQ ID NO: 30757 - DNA, 21 bp, Artificial Sequence
  Description of Artificial Sequence: Synthetic oligonucleotide
ttcccaagcaacccagcacac

SEQ ID NO: 30758 - DNA, 21 bp, Artificial Sequence
  Description of Artificial Sequence: Synthetic oligonucleotide
ttcccaagcagccaacaaaca

SEQ ID NO: 30759 - DNA, 21 bp, Artificial Sequence
  Description of Artificial Sequence: Synthetic oligonucleotide
ttcccaagcagcagactcagc

SEQ ID NO: 30760 - DNA, 21 bp, Artificial Sequence
  Description of Artificial Sequence: Synthetic oligonucleotide
ttcccaagcacaacactccca

SEQ ID NO: 30761 - DNA, 21 bp, Artificial Sequence
  Description of Artificial Sequence: Synthetic oligonucleotide
ttcccaacagactacgtccca

SEQ ID NO: 30762 - DNA, 21 bp, Artificial Sequence
  Description of Artificial Sequence: Synthetic oligonucleotide
ttcccaacaaaaggattcgtc

SEQ ID NO: 30763 - DNA, 21 bp, Artificial Sequence
  Description of Artificial Sequence: Synthetic oligonucleotide
ttcccaacaagcacaagcagc

SEQ ID NO: 30764 - DNA, 21 bp, Artificial Sequence
  Description of Artificial Sequence: Synthetic oligonucleotide
ttcccaacaagcacaacacca

SEQ ID NO: 30765 - DNA, 21 bp, Artificial Sequence
  Description of Artificial Sequence: Synthetic oligonucleotide
ttcccagtcgcacaacacgac

SEQ ID NO: 30766 - DNA, 21 bp, Artificial Sequence
  Description of Artificial Sequence: Synthetic oligonucleotide
ttcccagtcgacggaagacaa

SEQ ID NO: 30767 - DNA, 21 bp, Artificial Sequence
  Description of Artificial Sequence: Synthetic oligonucleotide
ttcccagtcggaaacagactc

SEQ ID NO: 30768 - DNA, 21 bp, Artificial Sequence
  Description of Artificial Sequence: Synthetic oligonucleotide
ttcccagtcggacaactcgca

SEQ ID NO: 30769 - DNA, 21 bp, Artificial Sequence
  Description of Artificial Sequence: Synthetic oligonucleotide
ttcccagtcaaaacaatggtc

SEQ ID NO: 30770 - DNA, 21 bp, Artificial Sequence
  Description of Artificial Sequence: Synthetic oligonucleotide
ttcccagtcagcgcaagagac

SEQ ID NO: 30771 - DNA, 21 bp, Artificial Sequence
  Description of Artificial Sequence: Synthetic oligonucleotide
ttccaagcagcaccagaccac

SEQ ID NO: 30772 - DNA, 21 bp, Artificial Sequence
  Description of Artificial Sequence: Synthetic oligonucleotide
ttccaagcaggaaaagcagtc

SEQ ID NO: 30773 - DNA, 21 bp, Artificial Sequence
  Description of Artificial Sequence: Synthetic oligonucleotide
ttccaaggagcaatcagcaga

SEQ ID NO: 30774 - DNA, 21 bp, Artificial Sequence
  Description of Artificial Sequence: Synthetic oligonucleotide
ttccaaggactcagactcgga

SEQ ID NO: 30775 - DNA, 21 bp, Artificial Sequence
  Description of Artificial Sequence: Synthetic oligonucleotide
ttccaaggaagcgtcccagaa

SEQ ID NO: 30776 - DNA, 21 bp, Artificial Sequence
  Description of Artificial Sequence: Synthetic oligonucleotide
ttccaaatcacagcacaagga

SEQ ID NO: 30777 - DNA, 21 bp, Artificial Sequence
  Description of Artificial Sequence: Synthetic oligonucleotide
ttccaaaaaagccacgcagga

SEQ ID NO: 30778 - DNA, 21 bp, Artificial Sequence
  Description of Artificial Sequence: Synthetic oligonucleotide
ttccaaaacccacaaagcagc

SEQ ID NO: 30779 - DNA, 21 bp, Artificial Sequence
  Description of Artificial Sequence: Synthetic oligonucleotide
ttccaaaaccaaggaccactc

SEQ ID NO: 30780 - DNA, 21 bp, Artificial Sequence
  Description of Artificial Sequence: Synthetic oligonucleotide
ttccaacaaacaggaccaaga

SEQ ID NO: 30781 - DNA, 21 bp, Artificial Sequence
  Description of Artificial Sequence: Synthetic oligonucleotide
ttccaaagagcaacactccaa

SEQ ID NO: 30782 - DNA, 21 bp, Artificial Sequence
  Description of Artificial Sequence: Synthetic oligonucleotide
ttccaaagcgcaacagtcgca

SEQ ID NO: 30783 - DNA, 21 bp, Artificial Sequence
  Description of Artificial Sequence: Synthetic oligonucleotide
ttccaaacaccaagcggagac

SEQ ID NO: 30784 - DNA, 21 bp, Artificial Sequence
  Description of Artificial Sequence: Synthetic oligonucleotide
ttccaagtcgtcggaagccca

SEQ ID NO: 30785 - DNA, 21 bp, Artificial Sequence
  Description of Artificial Sequence: Synthetic oligonucleotide
ttccaatacgaaccagcaatc

SEQ ID NO: 30786 - DNA, 21 bp, Artificial Sequence
  Description of Artificial Sequence: Synthetic oligonucleotide
ttcagagcagacctcctcaac

SEQ ID NO: 30787 - DNA, 21 bp, Artificial Sequence
  Description of Artificial Sequence: Synthetic oligonucleotide
ttcagagcaatcggaagcgga

SEQ ID NO: 30788 - DNA, 21 bp, Artificial Sequence
  Description of Artificial Sequence: Synthetic oligonucleotide
ttcagagcactcgtcgaacca

SEQ ID NO: 30789 - DNA, 21 bp, Artificial Sequence
  Description of Artificial Sequence: Synthetic oligonucleotide
ttcagagacgaacaaccaagc

SEQ ID NO: 30790 - DNA, 21 bp, Artificial Sequence
  Description of Artificial Sequence: Synthetic oligonucleotide
ttcagagaccaagcagacgga

SEQ ID NO: 30791 - DNA, 21 bp, Artificial Sequence
  Description of Artificial Sequence: Synthetic oligonucleotide
ttcagagacagcccaccaagc

SEQ ID NO: 30792 - DNA, 21 bp, Artificial Sequence
  Description of Artificial Sequence: Synthetic oligonucleotide
ttcagagaagaaccacaaaca

SEQ ID NO: 30793 - DNA, 21 bp, Artificial Sequence
  Description of Artificial Sequence: Synthetic oligonucleotide
ttcagaggaccaagcagcagc

SEQ ID NO: 30794 - DNA, 21 bp, Artificial Sequence
  Description of Artificial Sequence: Synthetic oligonucleotide
ttcagacacgcagacgcagtc

SEQ ID NO: 30795 - DNA, 21 bp, Artificial Sequence
  Description of Artificial Sequence: Synthetic oligonucleotide
ttcagacacgaccacagcgtc

SEQ ID NO: 30796 - DNA, 21 bp, Artificial Sequence
  Description of Artificial Sequence: Synthetic oligonucleotide
ttcagactccacagcacaagc

SEQ ID NO: 30797 - DNA, 21 bp, Artificial Sequence
  Description of Artificial Sequence: Synthetic oligonucleotide
ttcagactcccacacgaaaca

SEQ ID NO: 30798 - DNA, 21 bp, Artificial Sequence
  Description of Artificial Sequence: Synthetic oligonucleotide
ttcagaatgggagaagcacca

SEQ ID NO: 30799 - DNA, 21 bp, Artificial Sequence
  Description of Artificial Sequence: Synthetic oligonucleotide
ttcagaatgcaaaacgcagca

SEQ ID NO: 30800 - DNA, 21 bp, Artificial Sequence
  Description of Artificial Sequence: Synthetic oligonucleotide
ttcagaaacggaccagaacca

SEQ ID NO: 30801 - DNA, 21 bp, Artificial Sequence
  Description of Artificial Sequence: Synthetic oligonucleotide
ttcagaaacaacgtcagcctc

SEQ ID NO: 30802 - DNA, 21 bp, Artificial Sequence
  Description of Artificial Sequence: Synthetic oligonucleotide
ttcagaccactcgcactcgaa

SEQ ID NO: 30803 - DNA, 21 bp, Artificial Sequence
  Description of Artificial Sequence: Synthetic oligonucleotide
ttcagaccactcagcacacca

SEQ ID NO: 30804 - DNA, 21 bp, Artificial Sequence
  Description of Artificial Sequence: Synthetic oligonucleotide
ttcagaccaccagcactcagc

SEQ ID NO: 30805 - DNA, 21 bp, Artificial Sequence
  Description of Artificial Sequence: Synthetic oligonucleotide
ttcagaccacaagacacaatg

SEQ ID NO: 30806 - DNA, 21 bp, Artificial Sequence
  Description of Artificial Sequence: Synthetic oligonucleotide
ttcagacaaacaccaaaccac

SEQ ID NO: 30807 - DNA, 21 bp, Artificial Sequence
  Description of Artificial Sequence: Synthetic oligonucleotide
ttcagaagcgacagccacaac

SEQ ID NO: 30808 - DNA, 21 bp, Artificial Sequence
  Description of Artificial Sequence: Synthetic oligonucleotide
ttcagaagcggactcgcaatc

SEQ ID NO: 30809 - DNA, 21 bp, Artificial Sequence
  Description of Artificial Sequence: Synthetic oligonucleotide
ttcagaagcggactcgaatac

SEQ ID NO: 30810 - DNA, 21 bp, Artificial Sequence
  Description of Artificial Sequence: Synthetic oligonucleotide
ttcagaagcggaatggtcgca

SEQ ID NO: 30811 - DNA, 21 bp, Artificial Sequence
  Description of Artificial Sequence: Synthetic oligonucleotide
ttcagaagcaaaatcgacgca

SEQ ID NO: 30812 - DNA, 21 bp, Artificial Sequence
  Description of Artificial Sequence: Synthetic oligonucleotide
ttcagaagcccagcaggactc

SEQ ID NO: 30813 - DNA, 21 bp, Artificial Sequence
  Description of Artificial Sequence: Synthetic oligonucleotide
ttcagaagcacagaaaacaac

SEQ ID NO: 30814 - DNA, 21 bp, Artificial Sequence
  Description of Artificial Sequence: Synthetic oligonucleotide
ttcagaacaccacacagcgaa

SEQ ID NO: 30815 - DNA, 21 bp, Artificial Sequence
  Description of Artificial Sequence: Synthetic oligonucleotide
ttcagaacaagcacagaagga

SEQ ID NO: 30816 - DNA, 21 bp, Artificial Sequence
  Description of Artificial Sequence: Synthetic oligonucleotide
ttcagagtcccagacgcagac

SEQ ID NO: 30817 - DNA, 21 bp, Artificial Sequence
  Description of Artificial Sequence: Synthetic oligonucleotide
ttcagcgcagacgtcgacgga

SEQ ID NO: 30818 - DNA, 21 bp, Artificial Sequence
  Description of Artificial Sequence: Synthetic oligonucleotide
ttcagcgcaagaggaagcgga

SEQ ID NO: 30819 - DNA, 21 bp, Artificial Sequence
  Description of Artificial Sequence: Synthetic oligonucleotide
ttcagcgacggagaaagcctc

SEQ ID NO: 30820 - DNA, 21 bp, Artificial Sequence
  Description of Artificial Sequence: Synthetic oligonucleotide
ttcagcgaccacacagcacac

SEQ ID NO: 30821 - DNA, 21 bp, Artificial Sequence
  Description of Artificial Sequence: Synthetic oligonucleotide
ttcagcgacaacgcactcgac

SEQ ID NO: 30822 - DNA, 21 bp, Artificial Sequence
  Description of Artificial Sequence: Synthetic oligonucleotide
ttcagcgacagaccaggagac

SEQ ID NO: 30823 - DNA, 21 bp, Artificial Sequence
  Description of Artificial Sequence: Synthetic oligonucleotide
ttcagcgaacacgtcagcaaa

SEQ ID NO: 30824 - DNA, 21 bp, Artificial Sequence
  Description of Artificial Sequence: Synthetic oligonucleotide
ttcagcgaaagacacagcgaa

SEQ ID NO: 30825 - DNA, 21 bp, Artificial Sequence
  Description of Artificial Sequence: Synthetic oligonucleotide
ttcagcgaaagcaaaacacca

SEQ ID NO: 30826 - DNA, 21 bp, Artificial Sequence
  Description of Artificial Sequence: Synthetic oligonucleotide
ttcagcgaaacaagcaacatg

SEQ ID NO: 30827 - DNA, 21 bp, Artificial Sequence
  Description of Artificial Sequence: Synthetic oligonucleotide
ttcagcggagaaccactcagc

SEQ ID NO: 30828 - DNA, 21 bp, Artificial Sequence
  Description of Artificial Sequence: Synthetic oligonucleotide
ttcagcggacacaacacaatc

SEQ ID NO: 30829 - DNA, 21 bp, Artificial Sequence
  Description of Artificial Sequence: Synthetic oligonucleotide
ttcagccacccaggagcagca

SEQ ID NO: 30830 - DNA, 21 bp, Artificial Sequence
  Description of Artificial Sequence: Synthetic oligonucleotide
ttcagccacccacacccagca

SEQ ID NO: 30831 - DNA, 21 bp, Artificial Sequence
  Description of Artificial Sequence: Synthetic oligonucleotide
ttcagccacagccaaagcaca

SEQ ID NO: 30832 - DNA, 21 bp, Artificial Sequence
  Description of Artificial Sequence: Synthetic oligonucleotide
ttcagccacagcagcggaaaa

SEQ ID NO: 30833 - DNA, 21 bp, Artificial Sequence
  Description of Artificial Sequence: Synthetic oligonucleotide
ttcagcatcacaccaatcaaa

SEQ ID NO: 30834 - DNA, 21 bp, Artificial Sequence
  Description of Artificial Sequence: Synthetic oligonucleotide
ttcagcctcatgccaagagaa

SEQ ID NO: 30835 - DNA, 21 bp, Artificial Sequence
  Description of Artificial Sequence: Synthetic oligonucleotide
ttcagcctcacagcagacaaa

SEQ ID NO: 30836 - DNA, 21 bp, Artificial Sequence
  Description of Artificial Sequence: Synthetic oligonucleotide
ttcagcatgacagcacaagac

SEQ ID NO: 30837 - DNA, 21 bp, Artificial Sequence
  Description of Artificial Sequence: Synthetic oligonucleotide
ttcagcatgacagtccaccac

SEQ ID NO: 30838 - DNA, 21 bp, Artificial Sequence
  Description of Artificial Sequence: Synthetic oligonucleotide
ttcagcaaccaaatgccaatc

SEQ ID NO: 30839 - DNA, 21 bp, Artificial Sequence
  Description of Artificial Sequence: Synthetic oligonucleotide
ttcagcaacagcggaccattc

SEQ ID NO: 30840 - DNA, 21 bp, Artificial Sequence
  Description of Artificial Sequence: Synthetic oligonucleotide
ttcagcaacacaacaagcctc

SEQ ID NO: 30841 - DNA, 21 bp, Artificial Sequence
  Description of Artificial Sequence: Synthetic oligonucleotide
ttcagcaacacaacaacaaca

SEQ ID NO: 30842 - DNA, 21 bp, Artificial Sequence
  Description of Artificial Sequence: Synthetic oligonucleotide
ttcagcccaggaagcctcgca

SEQ ID NO: 30843 - DNA, 21 bp, Artificial Sequence
  Description of Artificial Sequence: Synthetic oligonucleotide
ttcagcccacacacactccca

SEQ ID NO: 30844 - DNA, 21 bp, Artificial Sequence
  Description of Artificial Sequence: Synthetic oligonucleotide
ttcagcccaatggaagcaagc

SEQ ID NO: 30845 - DNA, 21 bp, Artificial Sequence
  Description of Artificial Sequence: Synthetic oligonucleotide
ttcagcccaaacatcatgaga

SEQ ID NO: 30846 - DNA, 21 bp, Artificial Sequence
  Description of Artificial Sequence: Synthetic oligonucleotide
ttcagcccaagaagcatcgga

SEQ ID NO: 30847 - DNA, 21 bp, Artificial Sequence
  Description of Artificial Sequence: Synthetic oligonucleotide
ttcagcccatacgcagacgaa

SEQ ID NO: 30848 - DNA, 21 bp, Artificial Sequence
  Description of Artificial Sequence: Synthetic oligonucleotide
ttcagccaaccactcagaaac

SEQ ID NO: 30849 - DNA, 21 bp, Artificial Sequence
  Description of Artificial Sequence: Synthetic oligonucleotide
ttcagccaaagcctcccaaca

SEQ ID NO: 30850 - DNA, 21 bp, Artificial Sequence
  Description of Artificial Sequence: Synthetic oligonucleotide
ttcagcagaggaagcggacca

SEQ ID NO: 30851 - DNA, 21 bp, Artificial Sequence
  Description of Artificial Sequence: Synthetic oligonucleotide
ttcagcagactcaacccaagc

SEQ ID NO: 30852 - DNA, 21 bp, Artificial Sequence
  Description of Artificial Sequence: Synthetic oligonucleotide
ttcagcagaagccacatccca

SEQ ID NO: 30853 - DNA, 21 bp, Artificial Sequence
  Description of Artificial Sequence: Synthetic oligonucleotide
ttcagcagaacactcacaagc

SEQ ID NO: 30854 - DNA, 21 bp, Artificial Sequence
  Description of Artificial Sequence: Synthetic oligonucleotide
ttcagcagccacgaaagcagc

SEQ ID NO: 30855 - DNA, 21 bp, Artificial Sequence
  Description of Artificial Sequence: Synthetic oligonucleotide
ttcagcagccacggagaaagc

SEQ ID NO: 30856 - DNA, 21 bp, Artificial Sequence
  Description of Artificial Sequence: Synthetic oligonucleotide
ttcagcagcaacacagaactc

SEQ ID NO: 30857 - DNA, 21 bp, Artificial Sequence
  Description of Artificial Sequence: Synthetic oligonucleotide
ttcagcagcaacacattcgac

SEQ ID NO: 30858 - DNA, 21 bp, Artificial Sequence
  Description of Artificial Sequence: Synthetic oligonucleotide
ttcagcagcaacacaagcgca

SEQ ID NO: 30859 - DNA, 21 bp, Artificial Sequence
  Description of Artificial Sequence: Synthetic oligonucleotide
ttcagcagcaacacaagcgaa

SEQ ID NO: 30860 - DNA, 21 bp, Artificial Sequence
  Description of Artificial Sequence: Synthetic oligonucleotide
ttcagcagcccaagcggatac

SEQ ID NO: 30861 - DNA, 21 bp, Artificial Sequence
  Description of Artificial Sequence: Synthetic oligonucleotide
ttcagcagcagaacacaagca

SEQ ID NO: 30862 - DNA, 21 bp, Artificial Sequence
  Description of Artificial Sequence: Synthetic oligonucleotide
ttcagcagcagcatggcagca

SEQ ID NO: 30863 - DNA, 21 bp, Artificial Sequence
  Description of Artificial Sequence: Synthetic oligonucleotide
ttcagcagcagcacactcaaa

SEQ ID NO: 30864 - DNA, 21 bp, Artificial Sequence
  Description of Artificial Sequence: Synthetic oligonucleotide
ttcagcagcagcgtcacaagc

SEQ ID NO: 30865 - DNA, 21 bp, Artificial Sequence
  Description of Artificial Sequence: Synthetic oligonucleotide
ttcagcagcacaaacctcgca

SEQ ID NO: 30866 - DNA, 21 bp, Artificial Sequence
  Description of Artificial Sequence: Synthetic oligonucleotide
ttcagcagcacaccaggacac

SEQ ID NO: 30867 - DNA, 21 bp, Artificial Sequence
  Description of Artificial Sequence: Synthetic oligonucleotide
ttcagcagcacaagcccagac

SEQ ID NO: 30868 - DNA, 21 bp, Artificial Sequence
  Description of Artificial Sequence: Synthetic oligonucleotide
ttcagcagcacaagcccaatg

SEQ ID NO: 30869 - DNA, 21 bp, Artificial Sequence
  Description of Artificial Sequence: Synthetic oligonucleotide
ttcagcagcacaagcagcgca

SEQ ID NO: 30870 - DNA, 21 bp, Artificial Sequence
  Description of Artificial Sequence: Synthetic oligonucleotide
ttcagcagcgtcatcccaagc

SEQ ID NO: 30871 - DNA, 21 bp, Artificial Sequence
  Description of Artificial Sequence: Synthetic oligonucleotide
ttcagcagcgtcagaaacgaa

SEQ ID NO: 30872 - DNA, 21 bp, Artificial Sequence
  Description of Artificial Sequence: Synthetic oligonucleotide
ttcagcagcgtcagcacaaca

SEQ ID NO: 30873 - DNA, 21 bp, Artificial Sequence
  Description of Artificial Sequence: Synthetic oligonucleotide
ttcagcagctacgcaagcatg

SEQ ID NO: 30874 - DNA, 21 bp, Artificial Sequence
  Description of Artificial Sequence: Synthetic oligonucleotide
ttcagcagctacaacaacgca

SEQ ID NO: 30875 - DNA, 21 bp, Artificial Sequence
  Description of Artificial Sequence: Synthetic oligonucleotide
ttcagcacactcagcatccca

SEQ ID NO: 30876 - DNA, 21 bp, Artificial Sequence
  Description of Artificial Sequence: Synthetic oligonucleotide
ttcagcacaatgccagcaaaa

SEQ ID NO: 30877 - DNA, 21 bp, Artificial Sequence
  Description of Artificial Sequence: Synthetic oligonucleotide
ttcagcacaatgccaagagac

SEQ ID NO: 30878 - DNA, 21 bp, Artificial Sequence
  Description of Artificial Sequence: Synthetic oligonucleotide
ttcagcacaagaacacaacca

SEQ ID NO: 30879 - DNA, 21 bp, Artificial Sequence
  Description of Artificial Sequence: Synthetic oligonucleotide
ttcagcacaagcggacaagaa

SEQ ID NO: 30880 - DNA, 21 bp, Artificial Sequence
  Description of Artificial Sequence: Synthetic oligonucleotide
ttcagcacagtccaccaagca

SEQ ID NO: 30881 - DNA, 21 bp, Artificial Sequence
  Description of Artificial Sequence: Synthetic oligonucleotide
ttcagcacagtcaaagcagac

SEQ ID NO: 30882 - DNA, 21 bp, Artificial Sequence
  Description of Artificial Sequence: Synthetic oligonucleotide
ttcagcacatacagccaccac

SEQ ID NO: 30883 - DNA, 21 bp, Artificial Sequence
  Description of Artificial Sequence: Synthetic oligonucleotide
ttcagcgtcgcaagaatcgga

SEQ ID NO: 30884 - DNA, 21 bp, Artificial Sequence
  Description of Artificial Sequence: Synthetic oligonucleotide
ttcagcgtcccaagcgcagga

SEQ ID NO: 30885 - DNA, 21 bp, Artificial Sequence
  Description of Artificial Sequence: Synthetic oligonucleotide
ttcacagcaaaaggaatcaca

SEQ ID NO: 30886 - DNA, 21 bp, Artificial Sequence
  Description of Artificial Sequence: Synthetic oligonucleotide
ttcacagcaagaacaacagca

SEQ ID NO: 30887 - DNA, 21 bp, Artificial Sequence
  Description of Artificial Sequence: Synthetic oligonucleotide
ttcacagcaagcggagtcagc

SEQ ID NO: 30888 - DNA, 21 bp, Artificial Sequence
  Description of Artificial Sequence: Synthetic oligonucleotide
ttcacagcaacagtcgcaatc

SEQ ID NO: 30889 - DNA, 21 bp, Artificial Sequence
  Description of Artificial Sequence: Synthetic oligonucleotide
ttcacatgcccagcagtcagc

SEQ ID NO: 30890 - DNA, 21 bp, Artificial Sequence
  Description of Artificial Sequence: Synthetic oligonucleotide
ttcacagacatcgacgacaga

SEQ ID NO: 30891 - DNA, 21 bp, Artificial Sequence
  Description of Artificial Sequence: Synthetic oligonucleotide
ttcacagacagacaaggatac

SEQ ID NO: 30892 - DNA, 21 bp, Artificial Sequence
  Description of Artificial Sequence: Synthetic oligonucleotide
ttcacagacagcagcccatac

SEQ ID NO: 30893 - DNA, 21 bp, Artificial Sequence
  Description of Artificial Sequence: Synthetic oligonucleotide
ttcacagaacacggatacagc

SEQ ID NO: 30894 - DNA, 21 bp, Artificial Sequence
  Description of Artificial Sequence: Synthetic oligonucleotide
ttcacagaaccaagcacaagc

SEQ ID NO: 30895 - DNA, 21 bp, Artificial Sequence
  Description of Artificial Sequence: Synthetic oligonucleotide
ttcacaggaaaaggagacgtc

SEQ ID NO: 30896 - DNA, 21 bp, Artificial Sequence
  Description of Artificial Sequence: Synthetic oligonucleotide
ttcacaggaacacacagcgca

SEQ ID NO: 30897 - DNA, 21 bp, Artificial Sequence
  Description of Artificial Sequence: Synthetic oligonucleotide
ttcacacacagagtcccagac

SEQ ID NO: 30898 - DNA, 21 bp, Artificial Sequence
  Description of Artificial Sequence: Synthetic oligonucleotide
ttcacaatcaaaacaatcctc

SEQ ID NO: 30899 - DNA, 21 bp, Artificial Sequence
  Description of Artificial Sequence: Synthetic oligonucleotide
ttcacaaaaatgcaactcagc

SEQ ID NO: 30900 - DNA, 21 bp, Artificial Sequence
  Description of Artificial Sequence: Synthetic oligonucleotide
ttcacaaaaccaagcacaaca

SEQ ID NO: 30901 - DNA, 21 bp, Artificial Sequence
  Description of Artificial Sequence: Synthetic oligonucleotide
ttcacaaaaagcaaagcagac

SEQ ID NO: 30902 - DNA, 21 bp, Artificial Sequence
  Description of Artificial Sequence: Synthetic oligonucleotide
ttcacactcgaaagcaaactc

SEQ ID NO: 30903 - DNA, 21 bp, Artificial Sequence
  Description of Artificial Sequence: Synthetic oligonucleotide
ttcacactcgtcacactcgaa

SEQ ID NO: 30904 - DNA, 21 bp, Artificial Sequence
  Description of Artificial Sequence: Synthetic oligonucleotide
ttcacaatggcaccaatcgtc

SEQ ID NO: 30905 - DNA, 21 bp, Artificial Sequence
  Description of Artificial Sequence: Synthetic oligonucleotide
ttcacaaacgacccaagcagc

SEQ ID NO: 30906 - DNA, 21 bp, Artificial Sequence
  Description of Artificial Sequence: Synthetic oligonucleotide
ttcacaaacagagacgtcgca

SEQ ID NO: 30907 - DNA, 21 bp, Artificial Sequence
  Description of Artificial Sequence: Synthetic oligonucleotide
ttcacaaacagcagcagccca

SEQ ID NO: 30908 - DNA, 21 bp, Artificial Sequence
  Description of Artificial Sequence: Synthetic oligonucleotide
ttcacaccactcatcagccac

SEQ ID NO: 30909 - DNA, 21 bp, Artificial Sequence
  Description of Artificial Sequence: Synthetic oligonucleotide
ttcacacaagcactcttccca

SEQ ID NO: 30910 - DNA, 21 bp, Artificial Sequence
  Description of Artificial Sequence: Synthetic oligonucleotide
ttcacacaactcccaagcctc

SEQ ID NO: 30911 - DNA, 21 bp, Artificial Sequence
  Description of Artificial Sequence: Synthetic oligonucleotide
ttcacacaaatgagcctcagc

SEQ ID NO: 30912 - DNA, 21 bp, Artificial Sequence
  Description of Artificial Sequence: Synthetic oligonucleotide
ttcacacaaaacaaaccaatg

SEQ ID NO: 30913 - DNA, 21 bp, Artificial Sequence
  Description of Artificial Sequence: Synthetic oligonucleotide
ttcacacaaagcctcccaaca

SEQ ID NO: 30914 - DNA, 21 bp, Artificial Sequence
  Description of Artificial Sequence: Synthetic oligonucleotide
ttcacaagactcgaaccacaa

SEQ ID NO: 30915 - DNA, 21 bp, Artificial Sequence
  Description of Artificial Sequence: Synthetic oligonucleotide
ttcacaagaccaagcctcgca

SEQ ID NO: 30916 - DNA, 21 bp, Artificial Sequence
  Description of Artificial Sequence: Synthetic oligonucleotide
ttcacaagaagcgtcgcagca

SEQ ID NO: 30917 - DNA, 21 bp, Artificial Sequence
  Description of Artificial Sequence: Synthetic oligonucleotide
ttcacaagcgcaccactcctc

SEQ ID NO: 30918 - DNA, 21 bp, Artificial Sequence
  Description of Artificial Sequence: Synthetic oligonucleotide
ttcacaagcgcaccaaacatg

SEQ ID NO: 30919 - DNA, 21 bp, Artificial Sequence
  Description of Artificial Sequence: Synthetic oligonucleotide
ttcacaagcgacggaacagaa

SEQ ID NO: 30920 - DNA, 21 bp, Artificial Sequence
  Description of Artificial Sequence: Synthetic oligonucleotide
ttcacaagcaaaggaccattc

SEQ ID NO: 30921 - DNA, 21 bp, Artificial Sequence
  Description of Artificial Sequence: Synthetic oligonucleotide
ttcacaagcaaacacctcgga

SEQ ID NO: 30922 - DNA, 21 bp, Artificial Sequence
  Description of Artificial Sequence: Synthetic oligonucleotide
ttcacaagcagagaagacgca

SEQ ID NO: 30923 - DNA, 21 bp, Artificial Sequence
  Description of Artificial Sequence: Synthetic oligonucleotide
ttcacaagcacattcccaagc

SEQ ID NO: 30924 - DNA, 21 bp, Artificial Sequence
  Description of Artificial Sequence: Synthetic oligonucleotide
ttcacaacagcaccaatcctc

SEQ ID NO: 30925 - DNA, 21 bp, Artificial Sequence
  Description of Artificial Sequence: Synthetic oligonucleotide
ttcacaacagacagagtcagc

SEQ ID NO: 30926 - DNA, 21 bp, Artificial Sequence
  Description of Artificial Sequence: Synthetic oligonucleotide
ttcacaacaaaagcagcattc

SEQ ID NO: 30927 - DNA, 21 bp, Artificial Sequence
  Description of Artificial Sequence: Synthetic oligonucleotide
ttcacagtcaacctcctcgga

SEQ ID NO: 30928 - DNA, 21 bp, Artificial Sequence
  Description of Artificial Sequence: Synthetic oligonucleotide
ttcgtcgcaaacgtcagacca

SEQ ID NO: 30929 - DNA, 21 bp, Artificial Sequence
  Description of Artificial Sequence: Synthetic oligonucleotide
ttcgtcgcaagcgcaagccac

SEQ ID NO: 30930 - DNA, 21 bp, Artificial Sequence
  Description of Artificial Sequence: Synthetic oligonucleotide
ttcgtcgacaacaacctcagc

SEQ ID NO: 30931 - DNA, 21 bp, Artificial Sequence
  Description of Artificial Sequence: Synthetic oligonucleotide
ttcgtcgacccatactacgaa

SEQ ID NO: 30932 - DNA, 21 bp, Artificial Sequence
  Description of Artificial Sequence: Synthetic oligonucleotide
ttcgtcgaaagaagcagcagc

SEQ ID NO: 30933 - DNA, 21 bp, Artificial Sequence
  Description of Artificial Sequence: Synthetic oligonucleotide
ttcgtcggagcaacaatgagc

SEQ ID NO: 30934 - DNA, 21 bp, Artificial Sequence
  Description of Artificial Sequence: Synthetic oligonucleotide
ttcgtcggaaaaccagaaagc

SEQ ID NO: 30935 - DNA, 21 bp, Artificial Sequence
  Description of Artificial Sequence: Synthetic oligonucleotide
ttcgtcggaaacagcagactc

SEQ ID NO: 30936 - DNA, 21 bp, Artificial Sequence
  Description of Artificial Sequence: Synthetic oligonucleotide
ttcgtccacagcggaagacaa

SEQ ID NO: 30937 - DNA, 21 bp, Artificial Sequence
  Description of Artificial Sequence: Synthetic oligonucleotide
ttcgtcatgcacacaagagac

SEQ ID NO: 30938 - DNA, 21 bp, Artificial Sequence
  Description of Artificial Sequence: Synthetic oligonucleotide
ttcgtcaacgcaagagtccca

SEQ ID NO: 30939 - DNA, 21 bp, Artificial Sequence
  Description of Artificial Sequence: Synthetic oligonucleotide
ttcgtcaacccacacccaagc

SEQ ID NO: 30940 - DNA, 21 bp, Artificial Sequence
  Description of Artificial Sequence: Synthetic oligonucleotide
ttcgtcaaccaaacaacagtc

SEQ ID NO: 30941 - DNA, 21 bp, Artificial Sequence
  Description of Artificial Sequence: Synthetic oligonucleotide
ttcgtcccacacgcaaaccaa

SEQ ID NO: 30942 - DNA, 21 bp, Artificial Sequence
  Description of Artificial Sequence: Synthetic oligonucleotide
ttcgtccaacaaagcaaacca

SEQ ID NO: 30943 - DNA, 21 bp, Artificial Sequence
  Description of Artificial Sequence: Synthetic oligonucleotide
ttcgtcagccacagccaaagc

SEQ ID NO: 30944 - DNA, 21 bp, Artificial Sequence
  Description of Artificial Sequence: Synthetic oligonucleotide
ttcgtcagcagagacagagca

SEQ ID NO: 30945 - DNA, 21 bp, Artificial Sequence
  Description of Artificial Sequence: Synthetic oligonucleotide
ttcgtcagcagcatccacgca

SEQ ID NO: 30946 - DNA, 21 bp, Artificial Sequence
  Description of Artificial Sequence: Synthetic oligonucleotide
ttcgtcagcacaccaggaatg

SEQ ID NO: 30947 - DNA, 21 bp, Artificial Sequence
  Description of Artificial Sequence: Synthetic oligonucleotide
ttcgtcagcacaacaagccca

SEQ ID NO: 30948 - DNA, 21 bp, Artificial Sequence
  Description of Artificial Sequence: Synthetic oligonucleotide
ttcgtcagcacagtcgcacca

SEQ ID NO: 30949 - DNA, 21 bp, Artificial Sequence
  Description of Artificial Sequence: Synthetic oligonucleotide
ttcgtcacagcaacactccca

SEQ ID NO: 30950 - DNA, 21 bp, Artificial Sequence
  Description of Artificial Sequence: Synthetic oligonucleotide
ttcgtcacagaaagcatgctc

SEQ ID NO: 30951 - DNA, 21 bp, Artificial Sequence
  Description of Artificial Sequence: Synthetic oligonucleotide
ttcgtcgtcggaagcgacgga

SEQ ID NO: 30952 - DNA, 21 bp, Artificial Sequence
  Description of Artificial Sequence: Synthetic oligonucleotide
ttctggaaagaaggaagccca

SEQ ID NO: 30953 - DNA, 21 bp, Artificial Sequence
  Description of Artificial Sequence: Synthetic oligonucleotide
ttctacccaggaccaaaaatc

SEQ ID NO: 30954 - DNA, 21 bp, Artificial Sequence
  Description of Artificial Sequence: Synthetic oligonucleotide
ttctacccaagcatgaaagac

SEQ ID NO: 30955 - DNA, 21 bp, Artificial Sequence
  Description of Artificial Sequence: Synthetic oligonucleotide
ttctacccaacagaactcaaa

SEQ ID NO: 30956 - DNA, 21 bp, Artificial Sequence
  Description of Artificial Sequence: Synthetic oligonucleotide
ttctacagcgcaacaatgcca

SEQ ID NO: 30957 - DNA, 21 bp, Artificial Sequence
  Description of Artificial Sequence: Synthetic oligonucleotide
ggagcagcagcacaatacaca

SEQ ID NO: 30958 - DNA, 21 bp, Artificial Sequence
  Description of Artificial Sequence: Synthetic oligonucleotide
ggagcagcaccacaaagcatc

SEQ ID NO: 30959 - DNA, 21 bp, Artificial Sequence
  Description of Artificial Sequence: Synthetic oligonucleotide
ggagcagcaagcggactcgga

SEQ ID NO: 30960 - DNA, 21 bp, Artificial Sequence
  Description of Artificial Sequence: Synthetic oligonucleotide
ggagcagcaacactcatcagc

SEQ ID NO: 30961 - DNA, 21 bp, Artificial Sequence
  Description of Artificial Sequence: Synthetic oligonucleotide
ggagcagcaacaagaaaccca

SEQ ID NO: 30962 - DNA, 21 bp, Artificial Sequence
  Description of Artificial Sequence: Synthetic oligonucleotide
ggagcagacgaaccaggagga

SEQ ID NO: 30963 - DNA, 21 bp, Artificial Sequence
  Description of Artificial Sequence: Synthetic oligonucleotide
ggagcagacctcagcggaaga

SEQ ID NO: 30964 - DNA, 21 bp, Artificial Sequence
  Description of Artificial Sequence: Synthetic oligonucleotide
ggagcagacagaaacgtccca

SEQ ID NO: 30965 - DNA, 21 bp, Artificial Sequence
  Description of Artificial Sequence: Synthetic oligonucleotide
ggagcagacagcagcagatac

SEQ ID NO: 30966 - DNA, 21 bp, Artificial Sequence
  Description of Artificial Sequence: Synthetic oligonucleotide
ggagcagaaggaggaggaaac

SEQ ID NO: 30967 - DNA, 21 bp, Artificial Sequence
  Description of Artificial Sequence: Synthetic oligonucleotide
ggagcagaaaaacacctccca

SEQ ID NO: 30968 - DNA, 21 bp, Artificial Sequence
  Description of Artificial Sequence: Synthetic oligonucleotide
ggagcagaaccaatgctcgca

SEQ ID NO: 30969 - DNA, 21 bp, Artificial Sequence
  Description of Artificial Sequence: Synthetic oligonucleotide
ggagcagaaagcctcagcgtc

SEQ ID NO: 30970 - DNA, 21 bp, Artificial Sequence
  Description of Artificial Sequence: Synthetic oligonucleotide
ggagcattcgcactcagcgga

SEQ ID NO: 30971 - DNA, 21 bp, Artificial Sequence
  Description of Artificial Sequence: Synthetic oligonucleotide
ggagcattcggaccaacaagc

SEQ ID NO: 30972 - DNA, 21 bp, Artificial Sequence
  Description of Artificial Sequence: Synthetic oligonucleotide
ggagcaggagcaggaagcaga

SEQ ID NO: 30973 - DNA, 21 bp, Artificial Sequence
  Description of Artificial Sequence: Synthetic oligonucleotide
ggagcaggagaactcccacca

SEQ ID NO: 30974 - DNA, 21 bp, Artificial Sequence
  Description of Artificial Sequence: Synthetic oligonucleotide
ggagcaggactcaaaggaagc

SEQ ID NO: 30975 - DNA, 21 bp, Artificial Sequence
  Description of Artificial Sequence: Synthetic oligonucleotide
ggagcaggactcccagtcaca

SEQ ID NO: 30976 - DNA, 21 bp, Artificial Sequence
  Description of Artificial Sequence: Synthetic oligonucleotide
ggagcaggaatgaacacagca

SEQ ID NO: 30977 - DNA, 21 bp, Artificial Sequence
  Description of Artificial Sequence: Synthetic oligonucleotide
ggagcaggaacagcaatgctc

SEQ ID NO: 30978 - DNA, 21 bp, Artificial Sequence
  Description of Artificial Sequence: Synthetic oligonucleotide
ggagcacacgacacagtcaca

SEQ ID NO: 30979 - DNA, 21 bp, Artificial Sequence
  Description of Artificial Sequence: Synthetic oligonucleotide
ggagcacacgaatgcctcagc

SEQ ID NO: 30980 - DNA, 21 bp, Artificial Sequence
  Description of Artificial Sequence: Synthetic oligonucleotide
ggagcacacggagcataccaa

SEQ ID NO: 30981 - DNA, 21 bp, Artificial Sequence
  Description of Artificial Sequence: Synthetic oligonucleotide
ggagcacacagctacaacgtc

SEQ ID NO: 30982 - DNA, 21 bp, Artificial Sequence
  Description of Artificial Sequence: Synthetic oligonucleotide
ggagcacacacaggactcagc

SEQ ID NO: 30983 - DNA, 21 bp, Artificial Sequence
  Description of Artificial Sequence: Synthetic oligonucleotide
ggagcacacacagtcagactc

SEQ ID NO: 30984 - DNA, 21 bp, Artificial Sequence
  Description of Artificial Sequence: Synthetic oligonucleotide
ggagcacacgtcgcaccagtc

SEQ ID NO: 30985 - DNA, 21 bp, Artificial Sequence
  Description of Artificial Sequence: Synthetic oligonucleotide
ggagcactcgcaacagcaaca

SEQ ID NO: 30986 - DNA, 21 bp, Artificial Sequence
  Description of Artificial Sequence: Synthetic oligonucleotide
ggagcactcgacggaacagca

SEQ ID NO: 30987 - DNA, 21 bp, Artificial Sequence
  Description of Artificial Sequence: Synthetic oligonucleotide
ggagcactcggattcccacaa

SEQ ID NO: 30988 - DNA, 21 bp, Artificial Sequence
  Description of Artificial Sequence: Synthetic oligonucleotide
ggagcactcggagtcgcacac

SEQ ID NO: 30989 - DNA, 21 bp, Artificial Sequence
  Description of Artificial Sequence: Synthetic oligonucleotide
ggagcactcatgcaaaaaaac

SEQ ID NO: 30990 - DNA, 21 bp, Artificial Sequence
  Description of Artificial Sequence: Synthetic oligonucleotide
ggagcactcatggtcagcaga

SEQ ID NO: 30991 - DNA, 21 bp, Artificial Sequence
  Description of Artificial Sequence: Synthetic oligonucleotide
ggagcactcagcgcaaaccaa

SEQ ID NO: 30992 - DNA, 21 bp, Artificial Sequence
  Description of Artificial Sequence: Synthetic oligonucleotide
ggagcactcgtcatcacaagc

SEQ ID NO: 30993 - DNA, 21 bp, Artificial Sequence
  Description of Artificial Sequence: Synthetic oligonucleotide
ggagcaatgagcatcaacgca

SEQ ID NO: 30994 - DNA, 21 bp, Artificial Sequence
  Description of Artificial Sequence: Synthetic oligonucleotide
ggagcaaacggagcactcaga

SEQ ID NO: 30995 - DNA, 21 bp, Artificial Sequence
  Description of Artificial Sequence: Synthetic oligonucleotide
ggagcaaacatcagaatcgca

SEQ ID NO: 30996 - DNA, 21 bp, Artificial Sequence
  Description of Artificial Sequence: Synthetic oligonucleotide
ggagcaaacagactcgacaac

SEQ ID NO: 30997 - DNA, 21 bp, Artificial Sequence
  Description of Artificial Sequence: Synthetic oligonucleotide
ggagcaccaccactcccaaga

SEQ ID NO: 30998 - DNA, 21 bp, Artificial Sequence
  Description of Artificial Sequence: Synthetic oligonucleotide
ggagcacaactcacaagaatg

SEQ ID NO: 30999 - DNA, 21 bp, Artificial Sequence
  Description of Artificial Sequence: Synthetic oligonucleotide
ggagcacaaagacaactcaac

SEQ ID NO: 31000 - DNA, 21 bp, Artificial Sequence
  Description of Artificial Sequence: Synthetic oligonucleotide
ggagcaagagcactcggactc

SEQ ID NO: 31001 - DNA, 21 bp, Artificial Sequence
  Description of Artificial Sequence: Synthetic oligonucleotide
ggagcaagagcaaacggagga

SEQ ID NO: 31002 - DNA, 21 bp, Artificial Sequence
  Description of Artificial Sequence: Synthetic oligonucleotide
ggagcaagagaaatcccaagc

SEQ ID NO: 31003 - DNA, 21 bp, Artificial Sequence
  Description of Artificial Sequence: Synthetic oligonucleotide
ggagcaagaccagacctcgga

SEQ ID NO: 31004 - DNA, 21 bp, Artificial Sequence
  Description of Artificial Sequence: Synthetic oligonucleotide
ggagcaagagtcctcggaagc

SEQ ID NO: 31005 - DNA, 21 bp, Artificial Sequence
  Description of Artificial Sequence: Synthetic oligonucleotide
ggagcaagcgacacagactgg

SEQ ID NO: 31006 - DNA, 21 bp, Artificial Sequence
  Description of Artificial Sequence: Synthetic oligonucleotide
ggagcaagcggaacaagcaca

SEQ ID NO: 31007 - DNA, 21 bp, Artificial Sequence
  Description of Artificial Sequence: Synthetic oligonucleotide
ggagcaagcatcaaaagcagc

SEQ ID NO: 31008 - DNA, 21 bp, Artificial Sequence
  Description of Artificial Sequence: Synthetic oligonucleotide
ggagcaagcaaaaacccaaca

SEQ ID NO: 31009 - DNA, 21 bp, Artificial Sequence
  Description of Artificial Sequence: Synthetic oligonucleotide
ggagcaagcctcgcagacgac

SEQ ID NO: 31010 - DNA, 21 bp, Artificial Sequence
  Description of Artificial Sequence: Synthetic oligonucleotide
ggagcaagcctcaaaccagtc

SEQ ID NO: 31011 - DNA, 21 bp, Artificial Sequence
  Description of Artificial Sequence: Synthetic oligonucleotide
ggagcaagcagcgcaagcgga

SEQ ID NO: 31012 - DNA, 21 bp, Artificial Sequence
  Description of Artificial Sequence: Synthetic oligonucleotide
ggagcaagcagcctcaaacca

SEQ ID NO: 31013 - DNA, 21 bp, Artificial Sequence
  Description of Artificial Sequence: Synthetic oligonucleotide
ggagcaagcagcagaccagtc

SEQ ID NO: 31014 - DNA, 21 bp, Artificial Sequence
  Description of Artificial Sequence: Synthetic oligonucleotide
ggagcaagcacaagaaacatc

SEQ ID NO: 31015 - DNA, 21 bp, Artificial Sequence
  Description of Artificial Sequence: Synthetic oligonucleotide
ggagcaagcgtcaacccaaca

SEQ ID NO: 31016 - DNA, 21 bp, Artificial Sequence
  Description of Artificial Sequence: Synthetic oligonucleotide
ggagcaacaccaaaaacactc

SEQ ID NO: 31017 - DNA, 21 bp, Artificial Sequence
  Description of Artificial Sequence: Synthetic oligonucleotide
ggagcaacaccaccaagcaca

SEQ ID NO: 31018 - DNA, 21 bp, Artificial Sequence
  Description of Artificial Sequence: Synthetic oligonucleotide
ggagcaacacaattcagagaa

SEQ ID NO: 31019 - DNA, 21 bp, Artificial Sequence
  Description of Artificial Sequence: Synthetic oligonucleotide
ggagcaacaagccaaatcatg

SEQ ID NO: 31020 - DNA, 21 bp, Artificial Sequence
  Description of Artificial Sequence: Synthetic oligonucleotide
ggagcagtcagaccactcatg

SEQ ID NO: 31021 - DNA, 21 bp, Artificial Sequence
  Description of Artificial Sequence: Synthetic oligonucleotide
ggagcatggaaagcagaaaca

SEQ ID NO: 31022 - DNA, 21 bp, Artificial Sequence
  Description of Artificial Sequence: Synthetic oligonucleotide
ggagcatggctcccaaacgca

SEQ ID NO: 31023 - DNA, 21 bp, Artificial Sequence
  Description of Artificial Sequence: Synthetic oligonucleotide
ggagcatggagcctcccagac

SEQ ID NO: 31024 - DNA, 21 bp, Artificial Sequence
  Description of Artificial Sequence: Synthetic oligonucleotide
ggagcatacgcaagagcaaca

SEQ ID NO: 31025 - DNA, 21 bp, Artificial Sequence
  Description of Artificial Sequence: Synthetic oligonucleotide
ggagcatacgcatacaacgga

SEQ ID NO: 31026 - DNA, 21 bp, Artificial Sequence
  Description of Artificial Sequence: Synthetic oligonucleotide
ggagcatacggaatgagcgaa

SEQ ID NO: 31027 - DNA, 21 bp, Artificial Sequence
  Description of Artificial Sequence: Synthetic oligonucleotide
ggagcatacagaccagacctc

SEQ ID NO: 31028 - DNA, 21 bp, Artificial Sequence
  Description of Artificial Sequence: Synthetic oligonucleotide
ggatgcagcggacaacaaagc

SEQ ID NO: 31029 - DNA, 21 bp, Artificial Sequence
  Description of Artificial Sequence: Synthetic oligonucleotide
ggatgcagcagcctcccagaa

SEQ ID NO: 31030 - DNA, 21 bp, Artificial Sequence
  Description of Artificial Sequence: Synthetic oligonucleotide
ggatgcacaggataccaagca

SEQ ID NO: 31031 - DNA, 21 bp, Artificial Sequence
  Description of Artificial Sequence: Synthetic oligonucleotide
ggatgcgtcggaccattcagc

SEQ ID NO: 31032 - DNA, 21 bp, Artificial Sequence
  Description of Artificial Sequence: Synthetic oligonucleotide
ggagacgcagcatacaaaaac

SEQ ID NO: 31033 - DNA, 21 bp, Artificial Sequence
  Description of Artificial Sequence: Synthetic oligonucleotide
ggagacgcattcgtcgtcgga

SEQ ID NO: 31034 - DNA, 21 bp, Artificial Sequence
  Description of Artificial Sequence: Synthetic oligonucleotide
ggagacgcaacagacagaatg

SEQ ID NO: 31035 - DNA, 21 bp, Artificial Sequence
  Description of Artificial Sequence: Synthetic oligonucleotide
ggagacttcggaatgaaactc

SEQ ID NO: 31036 - DNA, 21 bp, Artificial Sequence
  Description of Artificial Sequence: Synthetic oligonucleotide
ggagacggaacaagaggagca

SEQ ID NO: 31037 - DNA, 21 bp, Artificial Sequence
  Description of Artificial Sequence: Synthetic oligonucleotide
ggagacggagtctacccagca

SEQ ID NO: 31038 - DNA, 21 bp, Artificial Sequence
  Description of Artificial Sequence: Synthetic oligonucleotide
ggagaccacaaaagcggagca

SEQ ID NO: 31039 - DNA, 21 bp, Artificial Sequence
  Description of Artificial Sequence: Synthetic oligonucleotide
ggagacaaagtcagaacactc

SEQ ID NO: 31040 - DNA, 21 bp, Artificial Sequence
  Description of Artificial Sequence: Synthetic oligonucleotide
ggagacctccacatcccagtc

SEQ ID NO: 31041 - DNA, 21 bp, Artificial Sequence
  Description of Artificial Sequence: Synthetic oligonucleotide
ggagacctcaacccagtccca

SEQ ID NO: 31042 - DNA, 21 bp, Artificial Sequence
  Description of Artificial Sequence: Synthetic oligonucleotide
ggagacctctactacaaagca

SEQ ID NO: 31043 - DNA, 21 bp, Artificial Sequence
  Description of Artificial Sequence: Synthetic oligonucleotide
ggagacatgctcaacgtcatc

SEQ ID NO: 31044 - DNA, 21 bp, Artificial Sequence
  Description of Artificial Sequence: Synthetic oligonucleotide
ggagacccaaacccagcagaa

SEQ ID NO: 31045 - DNA, 21 bp, Artificial Sequence
  Description of Artificial Sequence: Synthetic oligonucleotide
ggagacccagtccaccaaagc

SEQ ID NO: 31046 - DNA, 21 bp, Artificial Sequence
  Description of Artificial Sequence: Synthetic oligonucleotide
ggagacagagacggaagctgg

SEQ ID NO: 31047 - DNA, 21 bp, Artificial Sequence
  Description of Artificial Sequence: Synthetic oligonucleotide
ggagacagaatgccaagaagc

SEQ ID NO: 31048 - DNA, 21 bp, Artificial Sequence
  Description of Artificial Sequence: Synthetic oligonucleotide
ggagacagaagcacaagccac

SEQ ID NO: 31049 - DNA, 21 bp, Artificial Sequence
  Description of Artificial Sequence: Synthetic oligonucleotide
ggagacagaacaagcctcaga

SEQ ID NO: 31050 - DNA, 21 bp, Artificial Sequence
  Description of Artificial Sequence: Synthetic oligonucleotide
ggagacagagtcgtcggagtc

SEQ ID NO: 31051 - DNA, 21 bp, Artificial Sequence
  Description of Artificial Sequence: Synthetic oligonucleotide
ggagacagcttcccaatgagc

SEQ ID NO: 31052 - DNA, 21 bp, Artificial Sequence
  Description of Artificial Sequence: Synthetic oligonucleotide
ggagacagccaactctactac

SEQ ID NO: 31053 - DNA, 21 bp, Artificial Sequence
  Description of Artificial Sequence: Synthetic oligonucleotide
ggagacagcagcctccacagc

SEQ ID NO: 31054 - DNA, 21 bp, Artificial Sequence
  Description of Artificial Sequence: Synthetic oligonucleotide
ggagacacacacctcatcgga

SEQ ID NO: 31055 - DNA, 21 bp, Artificial Sequence
  Description of Artificial Sequence: Synthetic oligonucleotide
ggagacacactcaaagcacca

SEQ ID NO: 31056 - DNA, 21 bp, Artificial Sequence
  Description of Artificial Sequence: Synthetic oligonucleotide
ggagacacaagaccaagcctc

SEQ ID NO: 31057 - DNA, 21 bp, Artificial Sequence
  Description of Artificial Sequence: Synthetic oligonucleotide
ggagacgtcatcacaacacac

SEQ ID NO: 31058 - DNA, 21 bp, Artificial Sequence
  Description of Artificial Sequence: Synthetic oligonucleotide
ggagacgtcagcgtctacgac

SEQ ID NO: 31059 - DNA, 21 bp, Artificial Sequence
  Description of Artificial Sequence: Synthetic oligonucleotide
ggagaagacgcattcctcaga

SEQ ID NO: 31060 - DNA, 21 bp, Artificial Sequence
  Description of Artificial Sequence: Synthetic oligonucleotide
ggagaagacggattcagctac

SEQ ID NO: 31061 - DNA, 21 bp, Artificial Sequence
  Description of Artificial Sequence: Synthetic oligonucleotide
ggagaagaccacagcccacac

SEQ ID NO: 31062 - DNA, 21 bp, Artificial Sequence
  Description of Artificial Sequence: Synthetic oligonucleotide
ggagaaggaagctacccaaga

SEQ ID NO: 31063 - DNA, 21 bp, Artificial Sequence
  Description of Artificial Sequence: Synthetic oligonucleotide
ggagaaggaacataccaagca

SEQ ID NO: 31064 - DNA, 21 bp, Artificial Sequence
  Description of Artificial Sequence: Synthetic oligonucleotide
ggagaacacaaagcaaacagc

SEQ ID NO: 31065 - DNA, 21 bp, Artificial Sequence
  Description of Artificial Sequence: Synthetic oligonucleotide
ggagaaaaactcagagcatac

SEQ ID NO: 31066 - DNA, 21 bp, Artificial Sequence
  Description of Artificial Sequence: Synthetic oligonucleotide
ggagaaaaaagcatcccacca

SEQ ID NO: 31067 - DNA, 21 bp, Artificial Sequence
  Description of Artificial Sequence: Synthetic oligonucleotide
ggagaaaaaagcctcgtcgtc

SEQ ID NO: 31068 - DNA, 21 bp, Artificial Sequence
  Description of Artificial Sequence: Synthetic oligonucleotide
ggagaactcttcctcagcagc

SEQ ID NO: 31069 - DNA, 21 bp, Artificial Sequence
  Description of Artificial Sequence: Synthetic oligonucleotide
ggagaaaacccactcccagtc

SEQ ID NO: 31070 - DNA, 21 bp, Artificial Sequence
  Description of Artificial Sequence: Synthetic oligonucleotide
ggagaaccattcatgagagca

SEQ ID NO: 31071 - DNA, 21 bp, Artificial Sequence
  Description of Artificial Sequence: Synthetic oligonucleotide
ggagaaccaaaacaccacagc

SEQ ID NO: 31072 - DNA, 21 bp, Artificial Sequence
  Description of Artificial Sequence: Synthetic oligonucleotide
ggagaaccagtcgacacatgg

SEQ ID NO: 31073 - DNA, 21 bp, Artificial Sequence
  Description of Artificial Sequence: Synthetic oligonucleotide
ggagaaccagtcctcggagca

SEQ ID NO: 31074 - DNA, 21 bp, Artificial Sequence
  Description of Artificial Sequence: Synthetic oligonucleotide
ggagaaagattcagagaatgg

SEQ ID NO: 31075 - DNA, 21 bp, Artificial Sequence
  Description of Artificial Sequence: Synthetic oligonucleotide
ggagaaagaatgaaaatcgac

SEQ ID NO: 31076 - DNA, 21 bp, Artificial Sequence
  Description of Artificial Sequence: Synthetic oligonucleotide
ggagaaagaagcctcaacatg

SEQ ID NO: 31077 - DNA, 21 bp, Artificial Sequence
  Description of Artificial Sequence: Synthetic oligonucleotide
ggagaaagaagcccaccagaa

SEQ ID NO: 31078 - DNA, 21 bp, Artificial Sequence
  Description of Artificial Sequence: Synthetic oligonucleotide
ggagaaagcccagcaaacctc

SEQ ID NO: 31079 - DNA, 21 bp, Artificial Sequence
  Description of Artificial Sequence: Synthetic oligonucleotide
ggagaaacaccagcacacgca

SEQ ID NO: 31080 - DNA, 21 bp, Artificial Sequence
  Description of Artificial Sequence: Synthetic oligonucleotide
ggagaaacaagacacgtcgga

SEQ ID NO: 31081 - DNA, 21 bp, Artificial Sequence
  Description of Artificial Sequence: Synthetic oligonucleotide
ggagaaacaagcgcaatgcaa

SEQ ID NO: 31082 - DNA, 21 bp, Artificial Sequence
  Description of Artificial Sequence: Synthetic oligonucleotide
ggagaaacaacaaaaatgaga

SEQ ID NO: 31083 - DNA, 21 bp, Artificial Sequence
  Description of Artificial Sequence: Synthetic oligonucleotide
ggagaagtcgcaatgctctac

SEQ ID NO: 31084 - DNA, 21 bp, Artificial Sequence
  Description of Artificial Sequence: Synthetic oligonucleotide
ggagaagtcacaatcatgagc

SEQ ID NO: 31085 - DNA, 21 bp, Artificial Sequence
  Description of Artificial Sequence: Synthetic oligonucleotide
ggagaagtcgtcaacacaatg

SEQ ID NO: 31086 - DNA, 21 bp, Artificial Sequence
  Description of Artificial Sequence: Synthetic oligonucleotide
ggattcgacgcaggaaaaagc

SEQ ID NO: 31087 - DNA, 21 bp, Artificial Sequence
  Description of Artificial Sequence: Synthetic oligonucleotide
ggattcgacatcgcaagcgga

SEQ ID NO: 31088 - DNA, 21 bp, Artificial Sequence
  Description of Artificial Sequence: Synthetic oligonucleotide
ggattcgacgtcaaaatgagc

SEQ ID NO: 31089 - DNA, 21 bp, Artificial Sequence
  Description of Artificial Sequence: Synthetic oligonucleotide
ggattcgaagtccaactcatc

SEQ ID NO: 31090 - DNA, 21 bp, Artificial Sequence
  Description of Artificial Sequence: Synthetic oligonucleotide
ggattcttcgcacaagtccca

SEQ ID NO: 31091 - DNA, 21 bp, Artificial Sequence
  Description of Artificial Sequence: Synthetic oligonucleotide
ggattccacaacgcagcacca

SEQ ID NO: 31092 - DNA, 21 bp, Artificial Sequence
  Description of Artificial Sequence: Synthetic oligonucleotide
ggattcatcagcccaagcgca

SEQ ID NO: 31093 - DNA, 21 bp, Artificial Sequence
  Description of Artificial Sequence: Synthetic oligonucleotide
ggattcaaaaacgcactccca

SEQ ID NO: 31094 - DNA, 21 bp, Artificial Sequence
  Description of Artificial Sequence: Synthetic oligonucleotide
ggattcaacgcactcacagga

SEQ ID NO: 31095 - DNA, 21 bp, Artificial Sequence
  Description of Artificial Sequence: Synthetic oligonucleotide
ggattcaacccaagcctcgtc

SEQ ID NO: 31096 - DNA, 21 bp, Artificial Sequence
  Description of Artificial Sequence: Synthetic oligonucleotide
ggattcaacgtcgcaagcgga

SEQ ID NO: 31097 - DNA, 21 bp, Artificial Sequence
  Description of Artificial Sequence: Synthetic oligonucleotide
ggattcaacgtcggaggacca

SEQ ID NO: 31098 - DNA, 21 bp, Artificial Sequence
  Description of Artificial Sequence: Synthetic oligonucleotide
ggattcccaggaccacaattc

SEQ ID NO: 31099 - DNA, 21 bp, Artificial Sequence
  Description of Artificial Sequence: Synthetic oligonucleotide
ggattcagcggaacaccatac

SEQ ID NO: 31100 - DNA, 21 bp, Artificial Sequence
  Description of Artificial Sequence: Synthetic oligonucleotide
ggattcagccacatcagcctc

SEQ ID NO: 31101 - DNA, 21 bp, Artificial Sequence
  Description of Artificial Sequence: Synthetic oligonucleotide
ggattcagcatcagaagcaca

SEQ ID NO: 31102 - DNA, 21 bp, Artificial Sequence
  Description of Artificial Sequence: Synthetic oligonucleotide
ggattcagcagcctcagcagc

SEQ ID NO: 31103 - DNA, 21 bp, Artificial Sequence
  Description of Artificial Sequence: Synthetic oligonucleotide
ggattcacacaaagccaaatg

SEQ ID NO: 31104 - DNA, 21 bp, Artificial Sequence
  Description of Artificial Sequence: Synthetic oligonucleotide
ggaggagcagcaagagaactc

SEQ ID NO: 31105 - DNA, 21 bp, Artificial Sequence
  Description of Artificial Sequence: Synthetic oligonucleotide
ggaggagcagcaacaagcgtc

SEQ ID NO: 31106 - DNA, 21 bp, Artificial Sequence
  Description of Artificial Sequence: Synthetic oligonucleotide
ggaggagcaggagcaagaaca

SEQ ID NO: 31107 - DNA, 21 bp, Artificial Sequence
  Description of Artificial Sequence: Synthetic oligonucleotide
ggaggagcaagaagcagcatg

SEQ ID NO: 31108 - DNA, 21 bp, Artificial Sequence
  Description of Artificial Sequence: Synthetic oligonucleotide
ggaggagcagtccacacagtc

SEQ ID NO: 31109 - DNA, 21 bp, Artificial Sequence
  Description of Artificial Sequence: Synthetic oligonucleotide
ggaggagacagcggagcagaa

SEQ ID NO: 31110 - DNA, 21 bp, Artificial Sequence
  Description of Artificial Sequence: Synthetic oligonucleotide
ggaggagaaaacgtctacatc

SEQ ID NO: 31111 - DNA, 21 bp, Artificial Sequence
  Description of Artificial Sequence: Synthetic oligonucleotide
ggaggattcgcacaccaaagc

SEQ ID NO: 31112 - DNA, 21 bp, Artificial Sequence
  Description of Artificial Sequence: Synthetic oligonucleotide
ggaggattcaacggagcaaac

SEQ ID NO: 31113 - DNA, 21 bp, Artificial Sequence
  Description of Artificial Sequence: Synthetic oligonucleotide
ggaggaggactcacaatgaca

SEQ ID NO: 31114 - DNA, 21 bp, Artificial Sequence
  Description of Artificial Sequence: Synthetic oligonucleotide
ggaggaggaccagcactccca

SEQ ID NO: 31115 - DNA, 21 bp, Artificial Sequence
  Description of Artificial Sequence: Synthetic oligonucleotide
ggaggaggagtcaacaaacca

SEQ ID NO: 31116 - DNA, 21 bp, Artificial Sequence
  Description of Artificial Sequence: Synthetic oligonucleotide
ggaggacacatgagagacgga

SEQ ID NO: 31117 - DNA, 21 bp, Artificial Sequence
  Description of Artificial Sequence: Synthetic oligonucleotide
ggaggaatcgaaagcgcagtc

SEQ ID NO: 31118 - DNA, 21 bp, Artificial Sequence
  Description of Artificial Sequence: Synthetic oligonucleotide
ggaggaatccaaagcacagga

SEQ ID NO: 31119 - DNA, 21 bp, Artificial Sequence
  Description of Artificial Sequence: Synthetic oligonucleotide
ggaggaaaagacagaccagaa

SEQ ID NO: 31120 - DNA, 21 bp, Artificial Sequence
  Description of Artificial Sequence: Synthetic oligonucleotide
ggaggaaaacaaccacaagca

SEQ ID NO: 31121 - DNA, 21 bp, Artificial Sequence
  Description of Artificial Sequence: Synthetic oligonucleotide
ggaggaaaagtcgcaacagga

SEQ ID NO: 31122 - DNA, 21 bp, Artificial Sequence
  Description of Artificial Sequence: Synthetic oligonucleotide
ggaggactcaacagaaaccca

SEQ ID NO: 31123 - DNA, 21 bp, Artificial Sequence
  Description of Artificial Sequence: Synthetic oligonucleotide
ggaggactcccaagcccagca

SEQ ID NO: 31124 - DNA, 21 bp, Artificial Sequence
  Description of Artificial Sequence: Synthetic oligonucleotide
ggaggactcagcaaaagcctc

SEQ ID NO: 31125 - DNA, 21 bp, Artificial Sequence
  Description of Artificial Sequence: Synthetic oligonucleotide
ggaggaatggcaccaggacca

SEQ ID NO: 31126 - DNA, 21 bp, Artificial Sequence
  Description of Artificial Sequence: Synthetic oligonucleotide
ggaggaccagcatacgtcgga

SEQ ID NO: 31127 - DNA, 21 bp, Artificial Sequence
  Description of Artificial Sequence: Synthetic oligonucleotide
ggaggaccaggaaacaaccca

SEQ ID NO: 31128 - DNA, 21 bp, Artificial Sequence
  Description of Artificial Sequence: Synthetic oligonucleotide
ggaggaccactcccaaaaagc

SEQ ID NO: 31129 - DNA, 21 bp, Artificial Sequence
  Description of Artificial Sequence: Synthetic oligonucleotide
ggaggaccactcacaggacca

SEQ ID NO: 31130 - DNA, 21 bp, Artificial Sequence
  Description of Artificial Sequence: Synthetic oligonucleotide
ggaggaccaagagtcgcacca

SEQ ID NO: 31131 - DNA, 21 bp, Artificial Sequence
  Description of Artificial Sequence: Synthetic oligonucleotide
ggaggaccatacggaccagca

SEQ ID NO: 31132 - DNA, 21 bp, Artificial Sequence
  Description of Artificial Sequence: Synthetic oligonucleotide
ggaggacaagcaggaaaaaca

SEQ ID NO: 31133 - DNA, 21 bp, Artificial Sequence
  Description of Artificial Sequence: Synthetic oligonucleotide
ggaggacaacacctcgcacca

SEQ ID NO: 31134 - DNA, 21 bp, Artificial Sequence
  Description of Artificial Sequence: Synthetic oligonucleotide
ggaggacaaagctgcagagaa

SEQ ID NO: 31135 - DNA, 21 bp, Artificial Sequence
  Description of Artificial Sequence: Synthetic oligonucleotide
ggaggaagactcgcagtcgaa

SEQ ID NO: 31136 - DNA, 21 bp, Artificial Sequence
  Description of Artificial Sequence: Synthetic oligonucleotide
ggaggaagactccaacaagga

SEQ ID NO: 31137 - DNA, 21 bp, Artificial Sequence
  Description of Artificial Sequence: Synthetic oligonucleotide
ggaggaagaccagacccagaa

SEQ ID NO: 31138 - DNA, 21 bp, Artificial Sequence
  Description of Artificial Sequence: Synthetic oligonucleotide
ggaggaagaccaacaatcaca

SEQ ID NO: 31139 - DNA, 21 bp, Artificial Sequence
  Description of Artificial Sequence: Synthetic oligonucleotide
ggaggaagagtcgtctacagc

SEQ ID NO: 31140 - DNA, 21 bp, Artificial Sequence
  Description of Artificial Sequence: Synthetic oligonucleotide
ggaggaagatacagcgaactc

SEQ ID NO: 31141 - DNA, 21 bp, Artificial Sequence
  Description of Artificial Sequence: Synthetic oligonucleotide
ggaggaagcggactcgcagga

SEQ ID NO: 31142 - DNA, 21 bp, Artificial Sequence
  Description of Artificial Sequence: Synthetic oligonucleotide
ggaggaagcatggacagcctc

SEQ ID NO: 31143 - DNA, 21 bp, Artificial Sequence
  Description of Artificial Sequence: Synthetic oligonucleotide
ggaggaagcgtcagaacactc

SEQ ID NO: 31144 - DNA, 21 bp, Artificial Sequence
  Description of Artificial Sequence: Synthetic oligonucleotide
ggaggaacaagcagaagccca

SEQ ID NO: 31145 - DNA, 21 bp, Artificial Sequence
  Description of Artificial Sequence: Synthetic oligonucleotide
ggaggaacaacaaacctcttc

SEQ ID NO: 31146 - DNA, 21 bp, Artificial Sequence
  Description of Artificial Sequence: Synthetic oligonucleotide
ggaggagtcgcatacatcgca

SEQ ID NO: 31147 - DNA, 21 bp, Artificial Sequence
  Description of Artificial Sequence: Synthetic oligonucleotide
ggaggagtcggaaaaccagca

SEQ ID NO: 31148 - DNA, 21 bp, Artificial Sequence
  Description of Artificial Sequence: Synthetic oligonucleotide
ggaggagtcaacgcaatgaga

SEQ ID NO: 31149 - DNA, 21 bp, Artificial Sequence
  Description of Artificial Sequence: Synthetic oligonucleotide
ggaggatggagcagcgcacca

SEQ ID NO: 31150 - DNA, 21 bp, Artificial Sequence
  Description of Artificial Sequence: Synthetic oligonucleotide
ggaggatacgaaagcaacaac

SEQ ID NO: 31151 - DNA, 21 bp, Artificial Sequence
  Description of Artificial Sequence: Synthetic oligonucleotide
ggaggatacagcatgggacac

SEQ ID NO: 31152 - DNA, 21 bp, Artificial Sequence
  Description of Artificial Sequence: Synthetic oligonucleotide
ggacacgcaatccaactcctc

SEQ ID NO: 31153 - DNA, 21 bp, Artificial Sequence
  Description of Artificial Sequence: Synthetic oligonucleotide
ggacacgcaaaacacaacgtc

SEQ ID NO: 31154 - DNA, 21 bp, Artificial Sequence
  Description of Artificial Sequence: Synthetic oligonucleotide
ggacacgcaccacacatgatc

SEQ ID NO: 31155 - DNA, 21 bp, Artificial Sequence
  Description of Artificial Sequence: Synthetic oligonucleotide
ggacactgcacaagcaaaaac

SEQ ID NO: 31156 - DNA, 21 bp, Artificial Sequence
  Description of Artificial Sequence: Synthetic oligonucleotide
ggacacgacctcaaaccagtc

SEQ ID NO: 31157 - DNA, 21 bp, Artificial Sequence
  Description of Artificial Sequence: Synthetic oligonucleotide
ggacacgaaacaagacaagaa

SEQ ID NO: 31158 - DNA, 21 bp, Artificial Sequence
  Description of Artificial Sequence: Synthetic oligonucleotide
ggacacggactcccaagactc

SEQ ID NO: 31159 - DNA, 21 bp, Artificial Sequence
  Description of Artificial Sequence: Synthetic oligonucleotide
ggacacggaccattcgtcgga

SEQ ID NO: 31160 - DNA, 21 bp, Artificial Sequence
  Description of Artificial Sequence: Synthetic oligonucleotide
ggacacggacaaaacccagga

SEQ ID NO: 31161 - DNA, 21 bp, Artificial Sequence
  Description of Artificial Sequence: Synthetic oligonucleotide
ggacaccaccaaccagaccaa

SEQ ID NO: 31162 - DNA, 21 bp, Artificial Sequence
  Description of Artificial Sequence: Synthetic oligonucleotide
ggacacaaagcaagaccagac

SEQ ID NO: 31163 - DNA, 21 bp, Artificial Sequence
  Description of Artificial Sequence: Synthetic oligonucleotide
ggacacaaagacgaaagcctc

SEQ ID NO: 31164 - DNA, 21 bp, Artificial Sequence
  Description of Artificial Sequence: Synthetic oligonucleotide
ggacacctcgcactccacagc

SEQ ID NO: 31165 - DNA, 21 bp, Artificial Sequence
  Description of Artificial Sequence: Synthetic oligonucleotide
ggacacctccaagtcaacaca

SEQ ID NO: 31166 - DNA, 21 bp, Artificial Sequence
  Description of Artificial Sequence: Synthetic oligonucleotide
ggacacctcagcccaagcatg

SEQ ID NO: 31167 - DNA, 21 bp, Artificial Sequence
  Description of Artificial Sequence: Synthetic oligonucleotide
ggacacatggcaccagtccac

SEQ ID NO: 31168 - DNA, 21 bp, Artificial Sequence
  Description of Artificial Sequence: Synthetic oligonucleotide
ggacacatgagcaaaacagca

SEQ ID NO: 31169 - DNA, 21 bp, Artificial Sequence
  Description of Artificial Sequence: Synthetic oligonucleotide
ggacaccaaggaagcgaccac

SEQ ID NO: 31170 - DNA, 21 bp, Artificial Sequence
  Description of Artificial Sequence: Synthetic oligonucleotide
ggacaccaaggagtcctcctc

SEQ ID NO: 31171 - DNA, 21 bp, Artificial Sequence
  Description of Artificial Sequence: Synthetic oligonucleotide
ggacaccaaacatacccaagc

SEQ ID NO: 31172 - DNA, 21 bp, Artificial Sequence
  Description of Artificial Sequence: Synthetic oligonucleotide
ggacacagaagcgaccaaagc

SEQ ID NO: 31173 - DNA, 21 bp, Artificial Sequence
  Description of Artificial Sequence: Synthetic oligonucleotide
ggacacagcgcaggagcaagc

SEQ ID NO: 31174 - DNA, 21 bp, Artificial Sequence
  Description of Artificial Sequence: Synthetic oligonucleotide
ggacacagcggagacagagca

SEQ ID NO: 31175 - DNA, 21 bp, Artificial Sequence
  Description of Artificial Sequence: Synthetic oligonucleotide
ggacacagccacaacgcatac

SEQ ID NO: 31176 - DNA, 21 bp, Artificial Sequence
  Description of Artificial Sequence: Synthetic oligonucleotide
ggacacagcagcgcaagcaac

SEQ ID NO: 31177 - DNA, 21 bp, Artificial Sequence
  Description of Artificial Sequence: Synthetic oligonucleotide
ggacacagcgtcacacaccca

SEQ ID NO: 31178 - DNA, 21 bp, Artificial Sequence
  Description of Artificial Sequence: Synthetic oligonucleotide
ggacacagcgtcgtcaaaagc

SEQ ID NO: 31179 - DNA, 21 bp, Artificial Sequence
  Description of Artificial Sequence: Synthetic oligonucleotide
ggacacagctacccacaagca

SEQ ID NO: 31180 - DNA, 21 bp, Artificial Sequence
  Description of Artificial Sequence: Synthetic oligonucleotide
ggacacacactcaaaccacca

SEQ ID NO: 31181 - DNA, 21 bp, Artificial Sequence
  Description of Artificial Sequence: Synthetic oligonucleotide
ggacacgtcgaaccaagatac

SEQ ID NO: 31182 - DNA, 21 bp, Artificial Sequence
  Description of Artificial Sequence: Synthetic oligonucleotide
ggacacgtcggaagcagagtc

SEQ ID NO: 31183 - DNA, 21 bp, Artificial Sequence
  Description of Artificial Sequence: Synthetic oligonucleotide
ggacacgtcctcgtcacacca

SEQ ID NO: 31184 - DNA, 21 bp, Artificial Sequence
  Description of Artificial Sequence: Synthetic oligonucleotide
ggacacgtcagcgtcaacaca

SEQ ID NO: 31185 - DNA, 21 bp, Artificial Sequence
  Description of Artificial Sequence: Synthetic oligonucleotide
ggaatcgcagacctcgcagtc

SEQ ID NO: 31186 - DNA, 21 bp, Artificial Sequence
  Description of Artificial Sequence: Synthetic oligonucleotide
ggaatcgcaggaggaagacca

SEQ ID NO: 31187 - DNA, 21 bp, Artificial Sequence
  Description of Artificial Sequence: Synthetic oligonucleotide
ggaatcgcaggaagagcaaca

SEQ ID NO: 31188 - DNA, 21 bp, Artificial Sequence
  Description of Artificial Sequence: Synthetic oligonucleotide
ggaatcgcaagcgaactccca

SEQ ID NO: 31189 - DNA, 21 bp, Artificial Sequence
  Description of Artificial Sequence: Synthetic oligonucleotide
ggaatcgcatacatgacacca

SEQ ID NO: 31190 - DNA, 21 bp, Artificial Sequence
  Description of Artificial Sequence: Synthetic oligonucleotide
ggaatcgacctccacacagca

SEQ ID NO: 31191 - DNA, 21 bp, Artificial Sequence
  Description of Artificial Sequence: Synthetic oligonucleotide
ggaatcgacaacggaacagtc

SEQ ID NO: 31192 - DNA, 21 bp, Artificial Sequence
  Description of Artificial Sequence: Synthetic oligonucleotide
ggaatcgaaatcgacacacaa

SEQ ID NO: 31193 - DNA, 21 bp, Artificial Sequence
  Description of Artificial Sequence: Synthetic oligonucleotide
ggaatcgaaagaaacagcatc

SEQ ID NO: 31194 - DNA, 21 bp, Artificial Sequence
  Description of Artificial Sequence: Synthetic oligonucleotide
ggaatcttcgcagcaacaagc

SEQ ID NO: 31195 - DNA, 21 bp, Artificial Sequence
  Description of Artificial Sequence: Synthetic oligonucleotide
ggaatcggaagcgacagagac

SEQ ID NO: 31196 - DNA, 21 bp, Artificial Sequence
  Description of Artificial Sequence: Synthetic oligonucleotide
ggaatcggaacacacaaccca

SEQ ID NO: 31197 - DNA, 21 bp, Artificial Sequence
  Description of Artificial Sequence: Synthetic oligonucleotide
ggaatccacatcaaatacgca

SEQ ID NO: 31198 - DNA, 21 bp, Artificial Sequence
  Description of Artificial Sequence: Synthetic oligonucleotide
ggaatcaaaatgacaatcagc

SEQ ID NO: 31199 - DNA, 21 bp, Artificial Sequence
  Description of Artificial Sequence: Synthetic oligonucleotide
ggaatcaactggcaaagccca

SEQ ID NO: 31200 - DNA, 21 bp, Artificial Sequence
  Description of Artificial Sequence: Synthetic oligonucleotide
ggaatcccaagaggagcaaca

SEQ ID NO: 31201 - DNA, 21 bp, Artificial Sequence
  Description of Artificial Sequence: Synthetic oligonucleotide
ggaatcccaagcaacagcaga

SEQ ID NO: 31202 - DNA, 21 bp, Artificial Sequence
  Description of Artificial Sequence: Synthetic oligonucleotide
ggaatcccagtcagaggagaa

SEQ ID NO: 31203 - DNA, 21 bp, Artificial Sequence
  Description of Artificial Sequence: Synthetic oligonucleotide
ggaatccaaacattcgcacca

SEQ ID NO: 31204 - DNA, 21 bp, Artificial Sequence
  Description of Artificial Sequence: Synthetic oligonucleotide
ggaatccaaacagtcatgagc

SEQ ID NO: 31205 - DNA, 21 bp, Artificial Sequence
  Description of Artificial Sequence: Synthetic oligonucleotide
ggaatcagagaacacccatac

SEQ ID NO: 31206 - DNA, 21 bp, Artificial Sequence
  Description of Artificial Sequence: Synthetic oligonucleotide
ggaatcagaatcctcgaagca

SEQ ID NO: 31207 - DNA, 21 bp, Artificial Sequence
  Description of Artificial Sequence: Synthetic oligonucleotide
ggaatcagaatgccagcaaac

SEQ ID NO: 31208 - DNA, 21 bp, Artificial Sequence
  Description of Artificial Sequence: Synthetic oligonucleotide
ggaatcagcgcaggaatcctc

SEQ ID NO: 31209 - DNA, 21 bp, Artificial Sequence
  Description of Artificial Sequence: Synthetic oligonucleotide
ggaatcagcggaagcacagtc

SEQ ID NO: 31210 - DNA, 21 bp, Artificial Sequence
  Description of Artificial Sequence: Synthetic oligonucleotide
ggaatcagcctcagcagcgca

SEQ ID NO: 31211 - DNA, 21 bp, Artificial Sequence
  Description of Artificial Sequence: Synthetic oligonucleotide
ggaatcagcagaacagtcgac

SEQ ID NO: 31212 - DNA, 21 bp, Artificial Sequence
  Description of Artificial Sequence: Synthetic oligonucleotide
ggaatcagcgtcgacgcactc

SEQ ID NO: 31213 - DNA, 21 bp, Artificial Sequence
  Description of Artificial Sequence: Synthetic oligonucleotide
ggaatcacaacaagccaaaga

SEQ ID NO: 31214 - DNA, 21 bp, Artificial Sequence
  Description of Artificial Sequence: Synthetic oligonucleotide
ggaatcgtcacaaacaacaca

SEQ ID NO: 31215 - DNA, 21 bp, Artificial Sequence
  Description of Artificial Sequence: Synthetic oligonucleotide
ggaatcgtcgtcacaggacca

SEQ ID NO: 31216 - DNA, 21 bp, Artificial Sequence
  Description of Artificial Sequence: Synthetic oligonucleotide
ggaaaagacagactcctcgca

SEQ ID NO: 31217 - DNA, 21 bp, Artificial Sequence
  Description of Artificial Sequence: Synthetic oligonucleotide
ggaaaagaattcagctacaca

SEQ ID NO: 31218 - DNA, 21 bp, Artificial Sequence
  Description of Artificial Sequence: Synthetic oligonucleotide
ggaaaattcctcccacaaaca

SEQ ID NO: 31219 - DNA, 21 bp, Artificial Sequence
  Description of Artificial Sequence: Synthetic oligonucleotide
ggaaaaggattcgacagccca

SEQ ID NO: 31220 - DNA, 21 bp, Artificial Sequence
  Description of Artificial Sequence: Synthetic oligonucleotide
ggaaaaggactcacagcaaca

SEQ ID NO: 31221 - DNA, 21 bp, Artificial Sequence
  Description of Artificial Sequence: Synthetic oligonucleotide
ggaaaacacgtcaaagaaatg

SEQ ID NO: 31222 - DNA, 21 bp, Artificial Sequence
  Description of Artificial Sequence: Synthetic oligonucleotide
ggaaaaatcagcagcagcctc

SEQ ID NO: 31223 - DNA, 21 bp, Artificial Sequence
  Description of Artificial Sequence: Synthetic oligonucleotide
ggaaaactcgaactcgcacca

SEQ ID NO: 31224 - DNA, 21 bp, Artificial Sequence
  Description of Artificial Sequence: Synthetic oligonucleotide
ggaaaactcctcatgccacaa

SEQ ID NO: 31225 - DNA, 21 bp, Artificial Sequence
  Description of Artificial Sequence: Synthetic oligonucleotide
ggaaaactcacaagcacactc

SEQ ID NO: 31226 - DNA, 21 bp, Artificial Sequence
  Description of Artificial Sequence: Synthetic oligonucleotide
ggaaaactcgtcagctacgac

SEQ ID NO: 31227 - DNA, 21 bp, Artificial Sequence
  Description of Artificial Sequence: Synthetic oligonucleotide
ggaaaaatgagcgtcggaaac

SEQ ID NO: 31228 - DNA, 21 bp, Artificial Sequence
  Description of Artificial Sequence: Synthetic oligonucleotide
ggaaaaaacgcaacattccca

SEQ ID NO: 31229 - DNA, 21 bp, Artificial Sequence
  Description of Artificial Sequence: Synthetic oligonucleotide
ggaaaaaacggagacagaaca

SEQ ID NO: 31230 - DNA, 21 bp, Artificial Sequence
  Description of Artificial Sequence: Synthetic oligonucleotide
ggaaaaccagcaggagcaatc

SEQ ID NO: 31231 - DNA, 21 bp, Artificial Sequence
  Description of Artificial Sequence: Synthetic oligonucleotide
ggaaaaccagcaagcccatac

SEQ ID NO: 31232 - DNA, 21 bp, Artificial Sequence
  Description of Artificial Sequence: Synthetic oligonucleotide
ggaaaacaaaaccaatacaca

SEQ ID NO: 31233 - DNA, 21 bp, Artificial Sequence
  Description of Artificial Sequence: Synthetic oligonucleotide
ggaaaacaaacaccaccaagc

SEQ ID NO: 31234 - DNA, 21 bp, Artificial Sequence
  Description of Artificial Sequence: Synthetic oligonucleotide
ggaaaaagagcaccagtcgac

SEQ ID NO: 31235 - DNA, 21 bp, Artificial Sequence
  Description of Artificial Sequence: Synthetic oligonucleotide
ggaaaaagcccaggaccactc

SEQ ID NO: 31236 - DNA, 21 bp, Artificial Sequence
  Description of Artificial Sequence: Synthetic oligonucleotide
ggaaaaagccaaagcggactc

SEQ ID NO: 31237 - DNA, 21 bp, Artificial Sequence
  Description of Artificial Sequence: Synthetic oligonucleotide
ggaaaaagcgtcacagtcagc

SEQ ID NO: 31238 - DNA, 21 bp, Artificial Sequence
  Description of Artificial Sequence: Synthetic oligonucleotide
ggaaaaacagaagaaagacca

SEQ ID NO: 31239 - DNA, 21 bp, Artificial Sequence
  Description of Artificial Sequence: Synthetic oligonucleotide
ggaaaaacaaaaccagactac

SEQ ID NO: 31240 - DNA, 21 bp, Artificial Sequence
  Description of Artificial Sequence: Synthetic oligonucleotide
ggaaaaacagtcgactgggga

SEQ ID NO: 31241 - DNA, 21 bp, Artificial Sequence
  Description of Artificial Sequence: Synthetic oligonucleotide
ggaaaaacagtcaacatcgtc

SEQ ID NO: 31242 - DNA, 21 bp, Artificial Sequence
  Description of Artificial Sequence: Synthetic oligonucleotide
ggaaaaacagtcgtcagcgtc

SEQ ID NO: 31243 - DNA, 21 bp, Artificial Sequence
  Description of Artificial Sequence: Synthetic oligonucleotide
ggaaaagtcgaattcgcaatc

SEQ ID NO: 31244 - DNA, 21 bp, Artificial Sequence
  Description of Artificial Sequence: Synthetic oligonucleotide
ggaaaagtccacgaaggaatg

SEQ ID NO: 31245 - DNA, 21 bp, Artificial Sequence
  Description of Artificial Sequence: Synthetic oligonucleotide
ggaaaagtcccaacaatcagc

SEQ ID NO: 31246 - DNA, 21 bp, Artificial Sequence
  Description of Artificial Sequence: Synthetic oligonucleotide
ggaaaagtcgtccaaacacca

SEQ ID NO: 31247 - DNA, 21 bp, Artificial Sequence
  Description of Artificial Sequence: Synthetic oligonucleotide
ggactcgcagcaaaagcagac

SEQ ID NO: 31248 - DNA, 21 bp, Artificial Sequence
  Description of Artificial Sequence: Synthetic oligonucleotide
ggactcgcagcaacagtccca

SEQ ID NO: 31249 - DNA, 21 bp, Artificial Sequence
  Description of Artificial Sequence: Synthetic oligonucleotide
ggactcgcacaccaaggaaca

SEQ ID NO: 31250 - DNA, 21 bp, Artificial Sequence
  Description of Artificial Sequence: Synthetic oligonucleotide
ggactcgcaaaatacgcagaa

SEQ ID NO: 31251 - DNA, 21 bp, Artificial Sequence
  Description of Artificial Sequence: Synthetic oligonucleotide
ggactcgcactcagcagccca

SEQ ID NO: 31252 - DNA, 21 bp, Artificial Sequence
  Description of Artificial Sequence: Synthetic oligonucleotide
ggactcgcaaacagcccaagc

SEQ ID NO: 31253 - DNA, 21 bp, Artificial Sequence
  Description of Artificial Sequence: Synthetic oligonucleotide
ggactcgcagtcggaacaaga

SEQ ID NO: 31254 - DNA, 21 bp, Artificial Sequence
  Description of Artificial Sequence: Synthetic oligonucleotide
ggactcgaacaccacgtcaca

SEQ ID NO: 31255 - DNA, 21 bp, Artificial Sequence
  Description of Artificial Sequence: Synthetic oligonucleotide
ggactcggagcaccagaaaga

SEQ ID NO: 31256 - DNA, 21 bp, Artificial Sequence
  Description of Artificial Sequence: Synthetic oligonucleotide
ggactcggactcgtcacagga

SEQ ID NO: 31257 - DNA, 21 bp, Artificial Sequence
  Description of Artificial Sequence: Synthetic oligonucleotide
ggactcggaatgccacaaagc

SEQ ID NO: 31258 - DNA, 21 bp, Artificial Sequence
  Description of Artificial Sequence: Synthetic oligonucleotide
ggactcggaagcacactcgga

SEQ ID NO: 31259 - DNA, 21 bp, Artificial Sequence
  Description of Artificial Sequence: Synthetic oligonucleotide
ggactcggaacagcaagcgca

SEQ ID NO: 31260 - DNA, 21 bp, Artificial Sequence
  Description of Artificial Sequence: Synthetic oligonucleotide
ggactcggaacaatggtcatc

SEQ ID NO: 31261 - DNA, 21 bp, Artificial Sequence
  Description of Artificial Sequence: Synthetic oligonucleotide
ggactcggaacaccaagccca

SEQ ID NO: 31262 - DNA, 21 bp, Artificial Sequence
  Description of Artificial Sequence: Synthetic oligonucleotide
ggactcggaacaacaggaaga

SEQ ID NO: 31263 - DNA, 21 bp, Artificial Sequence
  Description of Artificial Sequence: Synthetic oligonucleotide
ggactccacgacccaccagtc

SEQ ID NO: 31264 - DNA, 21 bp, Artificial Sequence
  Description of Artificial Sequence: Synthetic oligonucleotide
ggactccacctcatggacgtc

SEQ ID NO: 31265 - DNA, 21 bp, Artificial Sequence
  Description of Artificial Sequence: Synthetic oligonucleotide
ggactcatcagccaaacagac

SEQ ID NO: 31266 - DNA, 21 bp, Artificial Sequence
  Description of Artificial Sequence: Synthetic oligonucleotide
ggactcaaagcagtcgacgga

SEQ ID NO: 31267 - DNA, 21 bp, Artificial Sequence
  Description of Artificial Sequence: Synthetic oligonucleotide
ggactcaaaatcacaacagaa

SEQ ID NO: 31268 - DNA, 21 bp, Artificial Sequence
  Description of Artificial Sequence: Synthetic oligonucleotide
ggactcaaaaacccacaaatg

SEQ ID NO: 31269 - DNA, 21 bp, Artificial Sequence
  Description of Artificial Sequence: Synthetic oligonucleotide
ggactcaaaagcacaatcaac

SEQ ID NO: 31270 - DNA, 21 bp, Artificial Sequence
  Description of Artificial Sequence: Synthetic oligonucleotide
ggactcctcggagaaaaaagc

SEQ ID NO: 31271 - DNA, 21 bp, Artificial Sequence
  Description of Artificial Sequence: Synthetic oligonucleotide
ggactcctcggaagatacgaa

SEQ ID NO: 31272 - DNA, 21 bp, Artificial Sequence
  Description of Artificial Sequence: Synthetic oligonucleotide
ggactcctcggaacaaaactc

SEQ ID NO: 31273 - DNA, 21 bp, Artificial Sequence
  Description of Artificial Sequence: Synthetic oligonucleotide
ggactcctcagcagagcagaa

SEQ ID NO: 31274 - DNA, 21 bp, Artificial Sequence
  Description of Artificial Sequence: Synthetic oligonucleotide
ggactcctcgtcctctaccca

SEQ ID NO: 31275 - DNA, 21 bp, Artificial Sequence
  Description of Artificial Sequence: Synthetic oligonucleotide
ggactcatggcacacagaaac

SEQ ID NO: 31276 - DNA, 21 bp, Artificial Sequence
  Description of Artificial Sequence: Synthetic oligonucleotide
ggactcatgctcatgaacgga

SEQ ID NO: 31277 - DNA, 21 bp, Artificial Sequence
  Description of Artificial Sequence: Synthetic oligonucleotide
ggactcaacccaggaacacac

SEQ ID NO: 31278 - DNA, 21 bp, Artificial Sequence
  Description of Artificial Sequence: Synthetic oligonucleotide
ggactcaacagattcagcgga

SEQ ID NO: 31279 - DNA, 21 bp, Artificial Sequence
  Description of Artificial Sequence: Synthetic oligonucleotide
ggactcaacgtcacaaaattc

SEQ ID NO: 31280 - DNA, 21 bp, Artificial Sequence
  Description of Artificial Sequence: Synthetic oligonucleotide
ggactcccaggagaactcgca

SEQ ID NO: 31281 - DNA, 21 bp, Artificial Sequence
  Description of Artificial Sequence: Synthetic oligonucleotide
ggactcccaggaggaagaagc

SEQ ID NO: 31282 - DNA, 21 bp, Artificial Sequence
  Description of Artificial Sequence: Synthetic oligonucleotide
ggactcccaggaagacacgca

SEQ ID NO: 31283 - DNA, 21 bp, Artificial Sequence
  Description of Artificial Sequence: Synthetic oligonucleotide
ggactcccacacagatacgaa

SEQ ID NO: 31284 - DNA, 21 bp, Artificial Sequence
  Description of Artificial Sequence: Synthetic oligonucleotide
ggactcccaatcccaagcctc

SEQ ID NO: 31285 - DNA, 21 bp, Artificial Sequence
  Description of Artificial Sequence: Synthetic oligonucleotide
ggactcccaaaacacccacca

SEQ ID NO: 31286 - DNA, 21 bp, Artificial Sequence
  Description of Artificial Sequence: Synthetic oligonucleotide
ggactcccaatggcaacagca

SEQ ID NO: 31287 - DNA, 21 bp, Artificial Sequence
  Description of Artificial Sequence: Synthetic oligonucleotide
ggactcccaaacagagaacca

SEQ ID NO: 31288 - DNA, 21 bp, Artificial Sequence
  Description of Artificial Sequence: Synthetic oligonucleotide
ggactcccaccagcaagcaaa

SEQ ID NO: 31289 - DNA, 21 bp, Artificial Sequence
  Description of Artificial Sequence: Synthetic oligonucleotide
ggactcccacaagcaagccac

SEQ ID NO: 31290 - DNA, 21 bp, Artificial Sequence
  Description of Artificial Sequence: Synthetic oligonucleotide
ggactcccacaacacaaacaa

SEQ ID NO: 31291 - DNA, 21 bp, Artificial Sequence
  Description of Artificial Sequence: Synthetic oligonucleotide
ggactcccaagcaacctcaca

SEQ ID NO: 31292 - DNA, 21 bp, Artificial Sequence
  Description of Artificial Sequence: Synthetic oligonucleotide
ggactcccaacagaagacaga

SEQ ID NO: 31293 - DNA, 21 bp, Artificial Sequence
  Description of Artificial Sequence: Synthetic oligonucleotide
ggactcccatacggaaacagc

SEQ ID NO: 31294 - DNA, 21 bp, Artificial Sequence
  Description of Artificial Sequence: Synthetic oligonucleotide
ggactccaacaagaagtcaga

SEQ ID NO: 31295 - DNA, 21 bp, Artificial Sequence
  Description of Artificial Sequence: Synthetic oligonucleotide
ggactccaaagcacaggactc

SEQ ID NO: 31296 - DNA, 21 bp, Artificial Sequence
  Description of Artificial Sequence: Synthetic oligonucleotide
ggactcagagaaccagtcgca

SEQ ID NO: 31297 - DNA, 21 bp, Artificial Sequence
  Description of Artificial Sequence: Synthetic oligonucleotide
ggactcagattcacagtcgaa

SEQ ID NO: 31298 - DNA, 21 bp, Artificial Sequence
  Description of Artificial Sequence: Synthetic oligonucleotide
ggactcagaaacctcggaagc

SEQ ID NO: 31299 - DNA, 21 bp, Artificial Sequence
  Description of Artificial Sequence: Synthetic oligonucleotide
ggactcagaaaccaagaactc

SEQ ID NO: 31300 - DNA, 21 bp, Artificial Sequence
  Description of Artificial Sequence: Synthetic oligonucleotide
ggactcagaccaggacaagac

SEQ ID NO: 31301 - DNA, 21 bp, Artificial Sequence
  Description of Artificial Sequence: Synthetic oligonucleotide
ggactcagaagcctcagcgca

SEQ ID NO: 31302 - DNA, 21 bp, Artificial Sequence
  Description of Artificial Sequence: Synthetic oligonucleotide
ggactcagaagcatgccagaa

SEQ ID NO: 31303 - DNA, 21 bp, Artificial Sequence
  Description of Artificial Sequence: Synthetic oligonucleotide
ggactcagaagcagctacgca

SEQ ID NO: 31304 - DNA, 21 bp, Artificial Sequence
  Description of Artificial Sequence: Synthetic oligonucleotide
ggactcagaacagcaagcaac

SEQ ID NO: 31305 - DNA, 21 bp, Artificial Sequence
  Description of Artificial Sequence: Synthetic oligonucleotide
ggactcagaacagacatgctc

SEQ ID NO: 31306 - DNA, 21 bp, Artificial Sequence
  Description of Artificial Sequence: Synthetic oligonucleotide
ggactcagcgcagcagcaaca

SEQ ID NO: 31307 - DNA, 21 bp, Artificial Sequence
  Description of Artificial Sequence: Synthetic oligonucleotide
ggactcagcgcactcgcaagc

SEQ ID NO: 31308 - DNA, 21 bp, Artificial Sequence
  Description of Artificial Sequence: Synthetic oligonucleotide
ggactcagcgcatacatccca

SEQ ID NO: 31309 - DNA, 21 bp, Artificial Sequence
  Description of Artificial Sequence: Synthetic oligonucleotide
ggactcagccacagcgcactc

SEQ ID NO: 31310 - DNA, 21 bp, Artificial Sequence
  Description of Artificial Sequence: Synthetic oligonucleotide
ggactcagcctcgacgactac

SEQ ID NO: 31311 - DNA, 21 bp, Artificial Sequence
  Description of Artificial Sequence: Synthetic oligonucleotide
ggactcagcctcaaatacgga

SEQ ID NO: 31312 - DNA, 21 bp, Artificial Sequence
  Description of Artificial Sequence: Synthetic oligonucleotide
ggactcagcctcctcagaaac

SEQ ID NO: 31313 - DNA, 21 bp, Artificial Sequence
  Description of Artificial Sequence: Synthetic oligonucleotide
ggactcagcatgccactccca

SEQ ID NO: 31314 - DNA, 21 bp, Artificial Sequence
  Description of Artificial Sequence: Synthetic oligonucleotide
ggactcagcccaagacaaaca

SEQ ID NO: 31315 - DNA, 21 bp, Artificial Sequence
  Description of Artificial Sequence: Synthetic oligonucleotide
ggactcagcagagcaccacca

SEQ ID NO: 31316 - DNA, 21 bp, Artificial Sequence
  Description of Artificial Sequence: Synthetic oligonucleotide
ggactcagcagccaccaccca

SEQ ID NO: 31317 - DNA, 21 bp, Artificial Sequence
  Description of Artificial Sequence: Synthetic oligonucleotide
ggactcagcacaaaaacaagc

SEQ ID NO: 31318 - DNA, 21 bp, Artificial Sequence
  Description of Artificial Sequence: Synthetic oligonucleotide
ggactcagcacagtcctcatg

SEQ ID NO: 31319 - DNA, 21 bp, Artificial Sequence
  Description of Artificial Sequence: Synthetic oligonucleotide
ggactcagcgtcacaagagtc

SEQ ID NO: 31320 - DNA, 21 bp, Artificial Sequence
  Description of Artificial Sequence: Synthetic oligonucleotide
ggactcacacacgtcgtccaa

SEQ ID NO: 31321 - DNA, 21 bp, Artificial Sequence
  Description of Artificial Sequence: Synthetic oligonucleotide
ggactcacactcgacctcaga

SEQ ID NO: 31322 - DNA, 21 bp, Artificial Sequence
  Description of Artificial Sequence: Synthetic oligonucleotide
ggactcacactcgtcccagca

SEQ ID NO: 31323 - DNA, 21 bp, Artificial Sequence
  Description of Artificial Sequence: Synthetic oligonucleotide
ggactcacaaacacaggaagc

SEQ ID NO: 31324 - DNA, 21 bp, Artificial Sequence
  Description of Artificial Sequence: Synthetic oligonucleotide
ggactcacaccagaccacgga

SEQ ID NO: 31325 - DNA, 21 bp, Artificial Sequence
  Description of Artificial Sequence: Synthetic oligonucleotide
ggactcacacaaccaggacca

SEQ ID NO: 31326 - DNA, 21 bp, Artificial Sequence
  Description of Artificial Sequence: Synthetic oligonucleotide
ggactcacaagccacccaatc

SEQ ID NO: 31327 - DNA, 21 bp, Artificial Sequence
  Description of Artificial Sequence: Synthetic oligonucleotide
ggactcacatacgcactcaca

SEQ ID NO: 31328 - DNA, 21 bp, Artificial Sequence
  Description of Artificial Sequence: Synthetic oligonucleotide
ggactcgtcgcacacacaatc

SEQ ID NO: 31329 - DNA, 21 bp, Artificial Sequence
  Description of Artificial Sequence: Synthetic oligonucleotide
ggactcgtcggaagagtccaa

SEQ ID NO: 31330 - DNA, 21 bp, Artificial Sequence
  Description of Artificial Sequence: Synthetic oligonucleotide
ggactcgtcatcggagtcgca

SEQ ID NO: 31331 - DNA, 21 bp, Artificial Sequence
  Description of Artificial Sequence: Synthetic oligonucleotide
ggactcgtcccaacagacgca

SEQ ID NO: 31332 - DNA, 21 bp, Artificial Sequence
  Description of Artificial Sequence: Synthetic oligonucleotide
ggactcgtcagcacacacgac

SEQ ID NO: 31333 - DNA, 21 bp, Artificial Sequence
  Description of Artificial Sequence: Synthetic oligonucleotide
ggactctacgacacaagaagc

SEQ ID NO: 31334 - DNA, 21 bp, Artificial Sequence
  Description of Artificial Sequence: Synthetic oligonucleotide
ggactctaccacctcaacgca

SEQ ID NO: 31335 - DNA, 21 bp, Artificial Sequence
  Description of Artificial Sequence: Synthetic oligonucleotide
ggactctacaacacaagcaca

SEQ ID NO: 31336 - DNA, 21 bp, Artificial Sequence
  Description of Artificial Sequence: Synthetic oligonucleotide
ggactctacccaaacttcaca

SEQ ID NO: 31337 - DNA, 21 bp, Artificial Sequence
  Description of Artificial Sequence: Synthetic oligonucleotide
ggaatggcagcaggacacagc

SEQ ID NO: 31338 - DNA, 21 bp, Artificial Sequence
  Description of Artificial Sequence: Synthetic oligonucleotide
ggaatggcagcaacagcaagc

SEQ ID NO: 31339 - DNA, 21 bp, Artificial Sequence
  Description of Artificial Sequence: Synthetic oligonucleotide
ggaatggcaggaatcagagac

SEQ ID NO: 31340 - DNA, 21 bp, Artificial Sequence
  Description of Artificial Sequence: Synthetic oligonucleotide
ggaatggcaatgacactcagc

SEQ ID NO: 31341 - DNA, 21 bp, Artificial Sequence
  Description of Artificial Sequence: Synthetic oligonucleotide
ggaatggcaacaggagtcgac

SEQ ID NO: 31342 - DNA, 21 bp, Artificial Sequence
  Description of Artificial Sequence: Synthetic oligonucleotide
ggaatggaccaagtcctcaga

SEQ ID NO: 31343 - DNA, 21 bp, Artificial Sequence
  Description of Artificial Sequence: Synthetic oligonucleotide
ggaatgggaacagcatacgga

SEQ ID NO: 31344 - DNA, 21 bp, Artificial Sequence
  Description of Artificial Sequence: Synthetic oligonucleotide
ggaatgaaaccaccagtcgac

SEQ ID NO: 31345 - DNA, 21 bp, Artificial Sequence
  Description of Artificial Sequence: Synthetic oligonucleotide
ggaatgctcagagcagtcagc

SEQ ID NO: 31346 - DNA, 21 bp, Artificial Sequence
  Description of Artificial Sequence: Synthetic oligonucleotide
ggaatgaacaacacagtcaga

SEQ ID NO: 31347 - DNA, 21 bp, Artificial Sequence
  Description of Artificial Sequence: Synthetic oligonucleotide
ggaatgaacagcagcctcgtc

SEQ ID NO: 31348 - DNA, 21 bp, Artificial Sequence
  Description of Artificial Sequence: Synthetic oligonucleotide
ggaatgccacacctcccacca

SEQ ID NO: 31349 - DNA, 21 bp, Artificial Sequence
  Description of Artificial Sequence: Synthetic oligonucleotide
ggaatgccaatcccaagcaac

SEQ ID NO: 31350 - DNA, 21 bp, Artificial Sequence
  Description of Artificial Sequence: Synthetic oligonucleotide
ggaatgagagacctccaacca

SEQ ID NO: 31351 - DNA, 21 bp, Artificial Sequence
  Description of Artificial Sequence: Synthetic oligonucleotide
ggaatgagacaaacacaagca

SEQ ID NO: 31352 - DNA, 21 bp, Artificial Sequence
  Description of Artificial Sequence: Synthetic oligonucleotide
ggaatgagcatgatcacaaga

SEQ ID NO: 31353 - DNA, 21 bp, Artificial Sequence
  Description of Artificial Sequence: Synthetic oligonucleotide
ggaatgagccaaggaagctac

SEQ ID NO: 31354 - DNA, 21 bp, Artificial Sequence
  Description of Artificial Sequence: Synthetic oligonucleotide
ggaatgagcagaagcttcagc

SEQ ID NO: 31355 - DNA, 21 bp, Artificial Sequence
  Description of Artificial Sequence: Synthetic oligonucleotide
ggaatgagcagcgcactcagc

SEQ ID NO: 31356 - DNA, 21 bp, Artificial Sequence
  Description of Artificial Sequence: Synthetic oligonucleotide
ggaatgagcgtcccaatggac

SEQ ID NO: 31357 - DNA, 21 bp, Artificial Sequence
  Description of Artificial Sequence: Synthetic oligonucleotide
ggaatgacaagaccacaagtc

SEQ ID NO: 31358 - DNA, 21 bp, Artificial Sequence
  Description of Artificial Sequence: Synthetic oligonucleotide
ggaaacgcagcaacactcaga

SEQ ID NO: 31359 - DNA, 21 bp, Artificial Sequence
  Description of Artificial Sequence: Synthetic oligonucleotide
ggaaacgcaagaccaatcaca

SEQ ID NO: 31360 - DNA, 21 bp, Artificial Sequence
  Description of Artificial Sequence: Synthetic oligonucleotide
ggaaacgcaagcccacaaatg

SEQ ID NO: 31361 - DNA, 21 bp, Artificial Sequence
  Description of Artificial Sequence: Synthetic oligonucleotide
ggaaacgcagtcggaggagac

SEQ ID NO: 31362 - DNA, 21 bp, Artificial Sequence
  Description of Artificial Sequence: Synthetic oligonucleotide
ggaaacgacgacagcaaatac

SEQ ID NO: 31363 - DNA, 21 bp, Artificial Sequence
  Description of Artificial Sequence: Synthetic oligonucleotide
ggaaacttccaaaaaaacgca

SEQ ID NO: 31364 - DNA, 21 bp, Artificial Sequence
  Description of Artificial Sequence: Synthetic oligonucleotide
ggaaacggaagaggattccaa

SEQ ID NO: 31365 - DNA, 21 bp, Artificial Sequence
  Description of Artificial Sequence: Synthetic oligonucleotide
ggaaacggaacaccagaacac

SEQ ID NO: 31366 - DNA, 21 bp, Artificial Sequence
  Description of Artificial Sequence: Synthetic oligonucleotide
ggaaaccacgcattccacgca

SEQ ID NO: 31367 - DNA, 21 bp, Artificial Sequence
  Description of Artificial Sequence: Synthetic oligonucleotide
ggaaaccacctccacctctgc

SEQ ID NO: 31368 - DNA, 21 bp, Artificial Sequence
  Description of Artificial Sequence: Synthetic oligonucleotide
ggaaaccacgtcctccaacca

SEQ ID NO: 31369 - DNA, 21 bp, Artificial Sequence
  Description of Artificial Sequence: Synthetic oligonucleotide
ggaaacctcctcacaatcagc

SEQ ID NO: 31370 - DNA, 21 bp, Artificial Sequence
  Description of Artificial Sequence: Synthetic oligonucleotide
ggaaacctcagccaaagattc

SEQ ID NO: 31371 - DNA, 21 bp, Artificial Sequence
  Description of Artificial Sequence: Synthetic oligonucleotide
ggaaacatgcacacactcaca

SEQ ID NO: 31372 - DNA, 21 bp, Artificial Sequence
  Description of Artificial Sequence: Synthetic oligonucleotide
ggaaacccactcaaaccacaa

SEQ ID NO: 31373 - DNA, 21 bp, Artificial Sequence
  Description of Artificial Sequence: Synthetic oligonucleotide
ggaaacagagaagcactcgca

SEQ ID NO: 31374 - DNA, 21 bp, Artificial Sequence
  Description of Artificial Sequence: Synthetic oligonucleotide
ggaaacagaaacagcaacgtc

SEQ ID NO: 31375 - DNA, 21 bp, Artificial Sequence
  Description of Artificial Sequence: Synthetic oligonucleotide
ggaaacagcgcaatgaacagc

SEQ ID NO: 31376 - DNA, 21 bp, Artificial Sequence
  Description of Artificial Sequence: Synthetic oligonucleotide
ggaaacagcgaccaaacaaga

SEQ ID NO: 31377 - DNA, 21 bp, Artificial Sequence
  Description of Artificial Sequence: Synthetic oligonucleotide
ggaaacagcctcgcaccacaa

SEQ ID NO: 31378 - DNA, 21 bp, Artificial Sequence
  Description of Artificial Sequence: Synthetic oligonucleotide
ggaaacagcagcgcaggaaac

SEQ ID NO: 31379 - DNA, 21 bp, Artificial Sequence
  Description of Artificial Sequence: Synthetic oligonucleotide
ggaaacagcagccacagcgac

SEQ ID NO: 31380 - DNA, 21 bp, Artificial Sequence
  Description of Artificial Sequence: Synthetic oligonucleotide
ggaaacagcacagtcgaccca

SEQ ID NO: 31381 - DNA, 21 bp, Artificial Sequence
  Description of Artificial Sequence: Synthetic oligonucleotide
ggaaacagcgtcccacacaac

SEQ ID NO: 31382 - DNA, 21 bp, Artificial Sequence
  Description of Artificial Sequence: Synthetic oligonucleotide
ggaaacagcgtccaacacaga

SEQ ID NO: 31383 - DNA, 21 bp, Artificial Sequence
  Description of Artificial Sequence: Synthetic oligonucleotide
ggaaacacagcaccacaaagc

SEQ ID NO: 31384 - DNA, 21 bp, Artificial Sequence
  Description of Artificial Sequence: Synthetic oligonucleotide
ggaaacacacacaacatgcaa

SEQ ID NO: 31385 - DNA, 21 bp, Artificial Sequence
  Description of Artificial Sequence: Synthetic oligonucleotide
ggaaacacaaaaagcccagga

SEQ ID NO: 31386 - DNA, 21 bp, Artificial Sequence
  Description of Artificial Sequence: Synthetic oligonucleotide
ggaaacacaaacagaaacgga

SEQ ID NO: 31387 - DNA, 21 bp, Artificial Sequence
  Description of Artificial Sequence: Synthetic oligonucleotide
ggaaacacaagcagcagagca

SEQ ID NO: 31388 - DNA, 21 bp, Artificial Sequence
  Description of Artificial Sequence: Synthetic oligonucleotide
ggaaacacagtcagaatccca

SEQ ID NO: 31389 - DNA, 21 bp, Artificial Sequence
  Description of Artificial Sequence: Synthetic oligonucleotide
ggaaacgtcctcagagtcgtc

SEQ ID NO: 31390 - DNA, 21 bp, Artificial Sequence
  Description of Artificial Sequence: Synthetic oligonucleotide
ggaaacgtcacaaaaggactc

SEQ ID NO: 31391 - DNA, 21 bp, Artificial Sequence
  Description of Artificial Sequence: Synthetic oligonucleotide
ggaaactacatcctcaaacca

SEQ ID NO: 31392 - DNA, 21 bp, Artificial Sequence
  Description of Artificial Sequence: Synthetic oligonucleotide
ggaaactacatcagcgcaagc

SEQ ID NO: 31393 - DNA, 21 bp, Artificial Sequence
  Description of Artificial Sequence: Synthetic oligonucleotide
ggaaactacaacctcgacctc

SEQ ID NO: 31394 - DNA, 21 bp, Artificial Sequence
  Description of Artificial Sequence: Synthetic oligonucleotide
ggaaactacagcagcgaagtc

SEQ ID NO: 31395 - DNA, 21 bp, Artificial Sequence
  Description of Artificial Sequence: Synthetic oligonucleotide
ggaccagcagcagacgtcaga

SEQ ID NO: 31396 - DNA, 21 bp, Artificial Sequence
  Description of Artificial Sequence: Synthetic oligonucleotide
ggaccagcactcctcatggac

SEQ ID NO: 31397 - DNA, 21 bp, Artificial Sequence
  Description of Artificial Sequence: Synthetic oligonucleotide
ggaccagcactcccaatcgca

SEQ ID NO: 31398 - DNA, 21 bp, Artificial Sequence
  Description of Artificial Sequence: Synthetic oligonucleotide
ggaccagcaatgggaagcctc

SEQ ID NO: 31399 - DNA, 21 bp, Artificial Sequence
  Description of Artificial Sequence: Synthetic oligonucleotide
ggaccagcaccaagcatcagc

SEQ ID NO: 31400 - DNA, 21 bp, Artificial Sequence
  Description of Artificial Sequence: Synthetic oligonucleotide
ggaccagcacaaagactccaa

SEQ ID NO: 31401 - DNA, 21 bp, Artificial Sequence
  Description of Artificial Sequence: Synthetic oligonucleotide
ggaccagcaagcatcgtcagc

SEQ ID NO: 31402 - DNA, 21 bp, Artificial Sequence
  Description of Artificial Sequence: Synthetic oligonucleotide
ggaccagcaacacacctcaca

SEQ ID NO: 31403 - DNA, 21 bp, Artificial Sequence
  Description of Artificial Sequence: Synthetic oligonucleotide
ggaccagacctcacaacagga

SEQ ID NO: 31404 - DNA, 21 bp, Artificial Sequence
  Description of Artificial Sequence: Synthetic oligonucleotide
ggaccagaccaagaagaacac

SEQ ID NO: 31405 - DNA, 21 bp, Artificial Sequence
  Description of Artificial Sequence: Synthetic oligonucleotide
ggaccagaagcaatgtacaaa

SEQ ID NO: 31406 - DNA, 21 bp, Artificial Sequence
  Description of Artificial Sequence: Synthetic oligonucleotide
ggaccagaacaagacatcatg

SEQ ID NO: 31407 - DNA, 21 bp, Artificial Sequence
  Description of Artificial Sequence: Synthetic oligonucleotide
ggaccagaatgggtcacagga

SEQ ID NO: 31408 - DNA, 21 bp, Artificial Sequence
  Description of Artificial Sequence: Synthetic oligonucleotide
ggaccattcgaacaaacagac

SEQ ID NO: 31409 - DNA, 21 bp, Artificial Sequence
  Description of Artificial Sequence: Synthetic oligonucleotide
ggaccaggagcaatccactac

SEQ ID NO: 31410 - DNA, 21 bp, Artificial Sequence
  Description of Artificial Sequence: Synthetic oligonucleotide
ggaccaggaatcgcaagcttc

SEQ ID NO: 31411 - DNA, 21 bp, Artificial Sequence
  Description of Artificial Sequence: Synthetic oligonucleotide
ggaccaggaaaagaaacaaga

SEQ ID NO: 31412 - DNA, 21 bp, Artificial Sequence
  Description of Artificial Sequence: Synthetic oligonucleotide
ggaccaggaatgctctgcgca

SEQ ID NO: 31413 - DNA, 21 bp, Artificial Sequence
  Description of Artificial Sequence: Synthetic oligonucleotide
ggaccaggaccaatcggaagc

SEQ ID NO: 31414 - DNA, 21 bp, Artificial Sequence
  Description of Artificial Sequence: Synthetic oligonucleotide
ggaccaggaagcttcagacca

SEQ ID NO: 31415 - DNA, 21 bp, Artificial Sequence
  Description of Artificial Sequence: Synthetic oligonucleotide
ggaccaggaagcagcagcatg

SEQ ID NO: 31416 - DNA, 21 bp, Artificial Sequence
  Description of Artificial Sequence: Synthetic oligonucleotide
ggaccacacatcagaatcgca

SEQ ID NO: 31417 - DNA, 21 bp, Artificial Sequence
  Description of Artificial Sequence: Synthetic oligonucleotide
ggaccacacctcgtccaacac

SEQ ID NO: 31418 - DNA, 21 bp, Artificial Sequence
  Description of Artificial Sequence: Synthetic oligonucleotide
ggaccacacacaagcatgatc

SEQ ID NO: 31419 - DNA, 21 bp, Artificial Sequence
  Description of Artificial Sequence: Synthetic oligonucleotide
ggaccacactacaacgaccca

SEQ ID NO: 31420 - DNA, 21 bp, Artificial Sequence
  Description of Artificial Sequence: Synthetic oligonucleotide
ggaccaatcgaactcacactc

SEQ ID NO: 31421 - DNA, 21 bp, Artificial Sequence
  Description of Artificial Sequence: Synthetic oligonucleotide
ggaccaaaactcacaccagtc

SEQ ID NO: 31422 - DNA, 21 bp, Artificial Sequence
  Description of Artificial Sequence: Synthetic oligonucleotide
ggaccaaaaatggaaccacac

SEQ ID NO: 31423 - DNA, 21 bp, Artificial Sequence
  Description of Artificial Sequence: Synthetic oligonucleotide
ggaccactcctcgtcagagga

SEQ ID NO: 31424 - DNA, 21 bp, Artificial Sequence
  Description of Artificial Sequence: Synthetic oligonucleotide
ggaccactcaacagcgtcatg

SEQ ID NO: 31425 - DNA, 21 bp, Artificial Sequence
  Description of Artificial Sequence: Synthetic oligonucleotide
ggaccactcccagaaggacac

SEQ ID NO: 31426 - DNA, 21 bp, Artificial Sequence
  Description of Artificial Sequence: Synthetic oligonucleotide
ggaccactcccaccaacaaca

SEQ ID NO: 31427 - DNA, 21 bp, Artificial Sequence
  Description of Artificial Sequence: Synthetic oligonucleotide
ggaccactcccagtcgcaaca

SEQ ID NO: 31428 - DNA, 21 bp, Artificial Sequence
  Description of Artificial Sequence: Synthetic oligonucleotide
ggaccactcagcgcaatgcca

SEQ ID NO: 31429 - DNA, 21 bp, Artificial Sequence
  Description of Artificial Sequence: Synthetic oligonucleotide
ggaccactcagcaacgtcaaa

SEQ ID NO: 31430 - DNA, 21 bp, Artificial Sequence
  Description of Artificial Sequence: Synthetic oligonucleotide
ggaccactcgtctacgcagac

SEQ ID NO: 31431 - DNA, 21 bp, Artificial Sequence
  Description of Artificial Sequence: Synthetic oligonucleotide
ggaccaatgcaaatgccaagc

SEQ ID NO: 31432 - DNA, 21 bp, Artificial Sequence
  Description of Artificial Sequence: Synthetic oligonucleotide
ggaccaatgagagaaatggaa

SEQ ID NO: 31433 - DNA, 21 bp, Artificial Sequence
  Description of Artificial Sequence: Synthetic oligonucleotide
ggaccaatgtacgcaaaccca

SEQ ID NO: 31434 - DNA, 21 bp, Artificial Sequence
  Description of Artificial Sequence: Synthetic oligonucleotide
ggaccaaacgacgtccaaaaa

SEQ ID NO: 31435 - DNA, 21 bp, Artificial Sequence
  Description of Artificial Sequence: Synthetic oligonucleotide
ggaccaaacttcctcctccca

SEQ ID NO: 31436 - DNA, 21 bp, Artificial Sequence
  Description of Artificial Sequence: Synthetic oligonucleotide
ggaccaaacggagcagtcgga

SEQ ID NO: 31437 - DNA, 21 bp, Artificial Sequence
  Description of Artificial Sequence: Synthetic oligonucleotide
ggaccaaacatgagaaacgga

SEQ ID NO: 31438 - DNA, 21 bp, Artificial Sequence
  Description of Artificial Sequence: Synthetic oligonucleotide
ggaccaaacagaggaagcctc

SEQ ID NO: 31439 - DNA, 21 bp, Artificial Sequence
  Description of Artificial Sequence: Synthetic oligonucleotide
ggaccaaacagactcacagtc

SEQ ID NO: 31440 - DNA, 21 bp, Artificial Sequence
  Description of Artificial Sequence: Synthetic oligonucleotide
ggaccaaacgtcctcagccca

SEQ ID NO: 31441 - DNA, 21 bp, Artificial Sequence
  Description of Artificial Sequence: Synthetic oligonucleotide
ggaccaccagcagtcaaagtc

SEQ ID NO: 31442 - DNA, 21 bp, Artificial Sequence
  Description of Artificial Sequence: Synthetic oligonucleotide
ggaccaccacacggacacagc

SEQ ID NO: 31443 - DNA, 21 bp, Artificial Sequence
  Description of Artificial Sequence: Synthetic oligonucleotide
ggaccaccaaaagcaaaccca

SEQ ID NO: 31444 - DNA, 21 bp, Artificial Sequence
  Description of Artificial Sequence: Synthetic oligonucleotide
ggaccaccactcctcgcacca

SEQ ID NO: 31445 - DNA, 21 bp, Artificial Sequence
  Description of Artificial Sequence: Synthetic oligonucleotide
ggaccaccaatgagaccaagc

SEQ ID NO: 31446 - DNA, 21 bp, Artificial Sequence
  Description of Artificial Sequence: Synthetic oligonucleotide
ggaccaccaccacaaccaagc

SEQ ID NO: 31447 - DNA, 21 bp, Artificial Sequence
  Description of Artificial Sequence: Synthetic oligonucleotide
ggaccaccaccaacaaactgg

SEQ ID NO: 31448 - DNA, 21 bp, Artificial Sequence
  Description of Artificial Sequence: Synthetic oligonucleotide
ggaccacaaacagtcacagga

SEQ ID NO: 31449 - DNA, 21 bp, Artificial Sequence
  Description of Artificial Sequence: Synthetic oligonucleotide
ggaccaagagacccaagaaac

SEQ ID NO: 31450 - DNA, 21 bp, Artificial Sequence
  Description of Artificial Sequence: Synthetic oligonucleotide
ggaccaagaggattcctcaac

SEQ ID NO: 31451 - DNA, 21 bp, Artificial Sequence
  Description of Artificial Sequence: Synthetic oligonucleotide
ggaccaagaccacaacacctc

SEQ ID NO: 31452 - DNA, 21 bp, Artificial Sequence
  Description of Artificial Sequence: Synthetic oligonucleotide
ggaccaagagtcacaaacgac

SEQ ID NO: 31453 - DNA, 21 bp, Artificial Sequence
  Description of Artificial Sequence: Synthetic oligonucleotide
ggaccaagcgaccacggaagc

SEQ ID NO: 31454 - DNA, 21 bp, Artificial Sequence
  Description of Artificial Sequence: Synthetic oligonucleotide
ggaccaagcaaagcactcgca

SEQ ID NO: 31455 - DNA, 21 bp, Artificial Sequence
  Description of Artificial Sequence: Synthetic oligonucleotide
ggaccaagcctcaacacaaca

SEQ ID NO: 31456 - DNA, 21 bp, Artificial Sequence
  Description of Artificial Sequence: Synthetic oligonucleotide
ggaccaagcccagaaagcagc

SEQ ID NO: 31457 - DNA, 21 bp, Artificial Sequence
  Description of Artificial Sequence: Synthetic oligonucleotide
ggaccaagcagaaacgcacca

SEQ ID NO: 31458 - DNA, 21 bp, Artificial Sequence
  Description of Artificial Sequence: Synthetic oligonucleotide
ggaccaagcagcgcaaaactc

SEQ ID NO: 31459 - DNA, 21 bp, Artificial Sequence
  Description of Artificial Sequence: Synthetic oligonucleotide
ggaccaagcagcagcgcatac

SEQ ID NO: 31460 - DNA, 21 bp, Artificial Sequence
  Description of Artificial Sequence: Synthetic oligonucleotide
ggaccaagcagcgtcccagac

SEQ ID NO: 31461 - DNA, 21 bp, Artificial Sequence
  Description of Artificial Sequence: Synthetic oligonucleotide
ggaccaagcacaagcctcatc

SEQ ID NO: 31462 - DNA, 21 bp, Artificial Sequence
  Description of Artificial Sequence: Synthetic oligonucleotide
ggaccaagcgtccacccagca

SEQ ID NO: 31463 - DNA, 21 bp, Artificial Sequence
  Description of Artificial Sequence: Synthetic oligonucleotide
ggaccaagcgtccacacagac

SEQ ID NO: 31464 - DNA, 21 bp, Artificial Sequence
  Description of Artificial Sequence: Synthetic oligonucleotide
ggaccaagctacatcgacagc

SEQ ID NO: 31465 - DNA, 21 bp, Artificial Sequence
  Description of Artificial Sequence: Synthetic oligonucleotide
ggaccaacagaaacaccactc

SEQ ID NO: 31466 - DNA, 21 bp, Artificial Sequence
  Description of Artificial Sequence: Synthetic oligonucleotide
ggaccaacaggagacctcgtc

SEQ ID NO: 31467 - DNA, 21 bp, Artificial Sequence
  Description of Artificial Sequence: Synthetic oligonucleotide
ggaccaacaggaagcagcgaa

SEQ ID NO: 31468 - DNA, 21 bp, Artificial Sequence
  Description of Artificial Sequence: Synthetic oligonucleotide
ggaccaacacacccaagaatc

SEQ ID NO: 31469 - DNA, 21 bp, Artificial Sequence
  Description of Artificial Sequence: Synthetic oligonucleotide
ggaccaacaatgagcatgaca

SEQ ID NO: 31470 - DNA, 21 bp, Artificial Sequence
  Description of Artificial Sequence: Synthetic oligonucleotide
ggaccaacaagcctcgcaatc

SEQ ID NO: 31471 - DNA, 21 bp, Artificial Sequence
  Description of Artificial Sequence: Synthetic oligonucleotide
ggaccaacatacccacacgca

SEQ ID NO: 31472 - DNA, 21 bp, Artificial Sequence
  Description of Artificial Sequence: Synthetic oligonucleotide
ggaccagtcaaaccaagagac

SEQ ID NO: 31473 - DNA, 21 bp, Artificial Sequence
  Description of Artificial Sequence: Synthetic oligonucleotide
ggaccagtcaacgcaccagac

SEQ ID NO: 31474 - DNA, 21 bp, Artificial Sequence
  Description of Artificial Sequence: Synthetic oligonucleotide
ggaccagtcagcggagtcagc

SEQ ID NO: 31475 - DNA, 21 bp, Artificial Sequence
  Description of Artificial Sequence: Synthetic oligonucleotide
ggaccatacaacgtcgacgtc

SEQ ID NO: 31476 - DNA, 21 bp, Artificial Sequence
  Description of Artificial Sequence: Synthetic oligonucleotide
ggaccatacagcgcaccagga

SEQ ID NO: 31477 - DNA, 21 bp, Artificial Sequence
  Description of Artificial Sequence: Synthetic oligonucleotide
ggacaagcaatcggacaccca

SEQ ID NO: 31478 - DNA, 21 bp, Artificial Sequence
  Description of Artificial Sequence: Synthetic oligonucleotide
ggacaagcaagaaacgaaaca

SEQ ID NO: 31479 - DNA, 21 bp, Artificial Sequence
  Description of Artificial Sequence: Synthetic oligonucleotide
ggacaagcaagcgcaccattc

SEQ ID NO: 31480 - DNA, 21 bp, Artificial Sequence
  Description of Artificial Sequence: Synthetic oligonucleotide
ggacaagcaagcatcagcagc

SEQ ID NO: 31481 - DNA, 21 bp, Artificial Sequence
  Description of Artificial Sequence: Synthetic oligonucleotide
ggacaagcaagcagacaaagc

SEQ ID NO: 31482 - DNA, 21 bp, Artificial Sequence
  Description of Artificial Sequence: Synthetic oligonucleotide
ggacaagcagtcaaagtcaac

SEQ ID NO: 31483 - DNA, 21 bp, Artificial Sequence
  Description of Artificial Sequence: Synthetic oligonucleotide
ggacaagacgacgtcaacatc

SEQ ID NO: 31484 - DNA, 21 bp, Artificial Sequence
  Description of Artificial Sequence: Synthetic oligonucleotide
ggacaagacatgcacgacagc

SEQ ID NO: 31485 - DNA, 21 bp, Artificial Sequence
  Description of Artificial Sequence: Synthetic oligonucleotide
ggacaagaatggcaagcagga

SEQ ID NO: 31486 - DNA, 21 bp, Artificial Sequence
  Description of Artificial Sequence: Synthetic oligonucleotide
ggacaattcgtcgtcagacaa

SEQ ID NO: 31487 - DNA, 21 bp, Artificial Sequence
  Description of Artificial Sequence: Synthetic oligonucleotide
ggacaaggacacccaccaaac

SEQ ID NO: 31488 - DNA, 21 bp, Artificial Sequence
  Description of Artificial Sequence: Synthetic oligonucleotide
ggacaaggaagcacaccactc

SEQ ID NO: 31489 - DNA, 21 bp, Artificial Sequence
  Description of Artificial Sequence: Synthetic oligonucleotide
ggacaacacgcaagactccaa

SEQ ID NO: 31490 - DNA, 21 bp, Artificial Sequence
  Description of Artificial Sequence: Synthetic oligonucleotide
ggacaacacggaaaaccagca

SEQ ID NO: 31491 - DNA, 21 bp, Artificial Sequence
  Description of Artificial Sequence: Synthetic oligonucleotide
ggacaacacctcagcccaaac

SEQ ID NO: 31492 - DNA, 21 bp, Artificial Sequence
  Description of Artificial Sequence: Synthetic oligonucleotide
ggacaaatcgtcgcaccaaca

SEQ ID NO: 31493 - DNA, 21 bp, Artificial Sequence
  Description of Artificial Sequence: Synthetic oligonucleotide
ggacaaatcgtcacaagcgga

SEQ ID NO: 31494 - DNA, 21 bp, Artificial Sequence
  Description of Artificial Sequence: Synthetic oligonucleotide
ggacaactcgacatgacaaca

SEQ ID NO: 31495 - DNA, 21 bp, Artificial Sequence
  Description of Artificial Sequence: Synthetic oligonucleotide
ggacaactcaacctcagacca

SEQ ID NO: 31496 - DNA, 21 bp, Artificial Sequence
  Description of Artificial Sequence: Synthetic oligonucleotide
ggacaactccaaagcggaagc

SEQ ID NO: 31497 - DNA, 21 bp, Artificial Sequence
  Description of Artificial Sequence: Synthetic oligonucleotide
ggacaaatggcaagaccagac

SEQ ID NO: 31498 - DNA, 21 bp, Artificial Sequence
  Description of Artificial Sequence: Synthetic oligonucleotide
ggacaaatgatcagcgcacaa

SEQ ID NO: 31499 - DNA, 21 bp, Artificial Sequence
  Description of Artificial Sequence: Synthetic oligonucleotide
ggacaaccaagcccatggcca

SEQ ID NO: 31500 - DNA, 21 bp, Artificial Sequence
  Description of Artificial Sequence: Synthetic oligonucleotide
ggacaacaagacaacagagac

SEQ ID NO: 31501 - DNA, 21 bp, Artificial Sequence
  Description of Artificial Sequence: Synthetic oligonucleotide
ggacaacaacaaggattcatc

SEQ ID NO: 31502 - DNA, 21 bp, Artificial Sequence
  Description of Artificial Sequence: Synthetic oligonucleotide
ggacaaagaaaactcgaagga

SEQ ID NO: 31503 - DNA, 21 bp, Artificial Sequence
  Description of Artificial Sequence: Synthetic oligonucleotide
ggacaaagaatgagcatgaca

SEQ ID NO: 31504 - DNA, 21 bp, Artificial Sequence
  Description of Artificial Sequence: Synthetic oligonucleotide
ggacaaagaacaacatacgtc

SEQ ID NO: 31505 - DNA, 21 bp, Artificial Sequence
  Description of Artificial Sequence: Synthetic oligonucleotide
ggacaaagcttcgaaagaaca

SEQ ID NO: 31506 - DNA, 21 bp, Artificial Sequence
  Description of Artificial Sequence: Synthetic oligonucleotide
ggacaaagcctcgcaatcaga

SEQ ID NO: 31507 - DNA, 21 bp, Artificial Sequence
  Description of Artificial Sequence: Synthetic oligonucleotide
ggacaaagcctcacacaccca

SEQ ID NO: 31508 - DNA, 21 bp, Artificial Sequence
  Description of Artificial Sequence: Synthetic oligonucleotide
ggacaaagcacaagacaagac

SEQ ID NO: 31509 - DNA, 21 bp, Artificial Sequence
  Description of Artificial Sequence: Synthetic oligonucleotide
ggacaaacatgcacaagcctc

SEQ ID NO: 31510 - DNA, 21 bp, Artificial Sequence
  Description of Artificial Sequence: Synthetic oligonucleotide
ggacaaacactcgcactcgac

SEQ ID NO: 31511 - DNA, 21 bp, Artificial Sequence
  Description of Artificial Sequence: Synthetic oligonucleotide
ggacaaacatacccaacactc

SEQ ID NO: 31512 - DNA, 21 bp, Artificial Sequence
  Description of Artificial Sequence: Synthetic oligonucleotide
ggacaagtccacctcaaccca

SEQ ID NO: 31513 - DNA, 21 bp, Artificial Sequence
  Description of Artificial Sequence: Synthetic oligonucleotide
ggacaatacggaagacaacca

SEQ ID NO: 31514 - DNA, 21 bp, Artificial Sequence
  Description of Artificial Sequence: Synthetic oligonucleotide
ggacaataccacagagacaca

SEQ ID NO: 31515 - DNA, 21 bp, Artificial Sequence
  Description of Artificial Sequence: Synthetic oligonucleotide
ggacaatacagcgcaagcaca

SEQ ID NO: 31516 - DNA, 21 bp, Artificial Sequence
  Description of Artificial Sequence: Synthetic oligonucleotide
ggaagagcagcaccaatcagc

SEQ ID NO: 31517 - DNA, 21 bp, Artificial Sequence
  Description of Artificial Sequence: Synthetic oligonucleotide
ggaagagcaaacacaggattc

SEQ ID NO: 31518 - DNA, 21 bp, Artificial Sequence
  Description of Artificial Sequence: Synthetic oligonucleotide
ggaagagcaagaccactccca

SEQ ID NO: 31519 - DNA, 21 bp, Artificial Sequence
  Description of Artificial Sequence: Synthetic oligonucleotide
ggaagagcaagcacatacgtc

SEQ ID NO: 31520 - DNA, 21 bp, Artificial Sequence
  Description of Artificial Sequence: Synthetic oligonucleotide
ggaagagacgaagtcccactc

SEQ ID NO: 31521 - DNA, 21 bp, Artificial Sequence
  Description of Artificial Sequence: Synthetic oligonucleotide
ggaagagacggaatgccaagc

SEQ ID NO: 31522 - DNA, 21 bp, Artificial Sequence
  Description of Artificial Sequence: Synthetic oligonucleotide
ggaagagacccaacaccagtc

SEQ ID NO: 31523 - DNA, 21 bp, Artificial Sequence
  Description of Artificial Sequence: Synthetic oligonucleotide
ggaagagacccagtcagacac

SEQ ID NO: 31524 - DNA, 21 bp, Artificial Sequence
  Description of Artificial Sequence: Synthetic oligonucleotide
ggaagagaacacatgcacaca

SEQ ID NO: 31525 - DNA, 21 bp, Artificial Sequence
  Description of Artificial Sequence: Synthetic oligonucleotide
ggaagagaactcctccacagc

SEQ ID NO: 31526 - DNA, 21 bp, Artificial Sequence
  Description of Artificial Sequence: Synthetic oligonucleotide
ggaagagaaagccaaatccca

SEQ ID NO: 31527 - DNA, 21 bp, Artificial Sequence
  Description of Artificial Sequence: Synthetic oligonucleotide
ggaagagaaagcgtcacaagc

SEQ ID NO: 31528 - DNA, 21 bp, Artificial Sequence
  Description of Artificial Sequence: Synthetic oligonucleotide
ggaagagaatacgtcggaaac

SEQ ID NO: 31529 - DNA, 21 bp, Artificial Sequence
  Description of Artificial Sequence: Synthetic oligonucleotide
ggaagattcggaacaagcgac

SEQ ID NO: 31530 - DNA, 21 bp, Artificial Sequence
  Description of Artificial Sequence: Synthetic oligonucleotide
ggaagaggagcacaaccagga

SEQ ID NO: 31531 - DNA, 21 bp, Artificial Sequence
  Description of Artificial Sequence: Synthetic oligonucleotide
ggaagaggagacaacccagca

SEQ ID NO: 31532 - DNA, 21 bp, Artificial Sequence
  Description of Artificial Sequence: Synthetic oligonucleotide
ggaagaggagaagcaggactc

SEQ ID NO: 31533 - DNA, 21 bp, Artificial Sequence
  Description of Artificial Sequence: Synthetic oligonucleotide
ggaagaggaggagaaagcgtc

SEQ ID NO: 31534 - DNA, 21 bp, Artificial Sequence
  Description of Artificial Sequence: Synthetic oligonucleotide
ggaagaggactcccaatgagc

SEQ ID NO: 31535 - DNA, 21 bp, Artificial Sequence
  Description of Artificial Sequence: Synthetic oligonucleotide
ggaagaggaccaccaccacca

SEQ ID NO: 31536 - DNA, 21 bp, Artificial Sequence
  Description of Artificial Sequence: Synthetic oligonucleotide
ggaagaggacaaagcgcaagc

SEQ ID NO: 31537 - DNA, 21 bp, Artificial Sequence
  Description of Artificial Sequence: Synthetic oligonucleotide
ggaagaggaacaccaccagac

SEQ ID NO: 31538 - DNA, 21 bp, Artificial Sequence
  Description of Artificial Sequence: Synthetic oligonucleotide
ggaagaatcgcaccagtccca

SEQ ID NO: 31539 - DNA, 21 bp, Artificial Sequence
  Description of Artificial Sequence: Synthetic oligonucleotide
ggaagaatctacacagcagaa

SEQ ID NO: 31540 - DNA, 21 bp, Artificial Sequence
  Description of Artificial Sequence: Synthetic oligonucleotide
ggaagactcctcccagaagtc

SEQ ID NO: 31541 - DNA, 21 bp, Artificial Sequence
  Description of Artificial Sequence: Synthetic oligonucleotide
ggaagactcccagcaagcctc

SEQ ID NO: 31542 - DNA, 21 bp, Artificial Sequence
  Description of Artificial Sequence: Synthetic oligonucleotide
ggaagaatggaaggaggagga

SEQ ID NO: 31543 - DNA, 21 bp, Artificial Sequence
  Description of Artificial Sequence: Synthetic oligonucleotide
ggaagaatggaaaacacagtc

SEQ ID NO: 31544 - DNA, 21 bp, Artificial Sequence
  Description of Artificial Sequence: Synthetic oligonucleotide
ggaagaatgatgaacagcagc

SEQ ID NO: 31545 - DNA, 21 bp, Artificial Sequence
  Description of Artificial Sequence: Synthetic oligonucleotide
ggaagaatggtcacaggagaa

SEQ ID NO: 31546 - DNA, 21 bp, Artificial Sequence
  Description of Artificial Sequence: Synthetic oligonucleotide
ggaagaaacgacgcatacgca

SEQ ID NO: 31547 - DNA, 21 bp, Artificial Sequence
  Description of Artificial Sequence: Synthetic oligonucleotide
ggaagaaacgaaccatggagc

SEQ ID NO: 31548 - DNA, 21 bp, Artificial Sequence
  Description of Artificial Sequence: Synthetic oligonucleotide
ggaagaaacccaccactctac

SEQ ID NO: 31549 - DNA, 21 bp, Artificial Sequence
  Description of Artificial Sequence: Synthetic oligonucleotide
ggaagaaacccaccaagcgca

SEQ ID NO: 31550 - DNA, 21 bp, Artificial Sequence
  Description of Artificial Sequence: Synthetic oligonucleotide
ggaagaaacagcaactacgac

SEQ ID NO: 31551 - DNA, 21 bp, Artificial Sequence
  Description of Artificial Sequence: Synthetic oligonucleotide
ggaagaaacgtcgcaggactc

SEQ ID NO: 31552 - DNA, 21 bp, Artificial Sequence
  Description of Artificial Sequence: Synthetic oligonucleotide
ggaagaccagacacagaacac

SEQ ID NO: 31553 - DNA, 21 bp, Artificial Sequence
  Description of Artificial Sequence: Synthetic oligonucleotide
ggaagaccactcccaacaagc

SEQ ID NO: 31554 - DNA, 21 bp, Artificial Sequence
  Description of Artificial Sequence: Synthetic oligonucleotide
ggaagaccactccaagcacca

SEQ ID NO: 31555 - DNA, 21 bp, Artificial Sequence
  Description of Artificial Sequence: Synthetic oligonucleotide
ggaagaccaccactcctccca

SEQ ID NO: 31556 - DNA, 21 bp, Artificial Sequence
  Description of Artificial Sequence: Synthetic oligonucleotide
ggaagaccaccaagcatgagc

SEQ ID NO: 31557 - DNA, 21 bp, Artificial Sequence
  Description of Artificial Sequence: Synthetic oligonucleotide
ggaagaccaccaacagacaaa

SEQ ID NO: 31558 - DNA, 21 bp, Artificial Sequence
  Description of Artificial Sequence: Synthetic oligonucleotide
ggaagacaagaccacccagga

SEQ ID NO: 31559 - DNA, 21 bp, Artificial Sequence
  Description of Artificial Sequence: Synthetic oligonucleotide
ggaagacaactcgcatgcaac

SEQ ID NO: 31560 - DNA, 21 bp, Artificial Sequence
  Description of Artificial Sequence: Synthetic oligonucleotide
ggaagacaaatgggaatcaca

SEQ ID NO: 31561 - DNA, 21 bp, Artificial Sequence
  Description of Artificial Sequence: Synthetic oligonucleotide
ggaagacaaccaagcggagaa

SEQ ID NO: 31562 - DNA, 21 bp, Artificial Sequence
  Description of Artificial Sequence: Synthetic oligonucleotide
ggaagacaaagcgtcagcaac

SEQ ID NO: 31563 - DNA, 21 bp, Artificial Sequence
  Description of Artificial Sequence: Synthetic oligonucleotide
ggaagacaagtcgacttcgtc

SEQ ID NO: 31564 - DNA, 21 bp, Artificial Sequence
  Description of Artificial Sequence: Synthetic oligonucleotide
ggaagaagcgacctcagcaac

SEQ ID NO: 31565 - DNA, 21 bp, Artificial Sequence
  Description of Artificial Sequence: Synthetic oligonucleotide
ggaagaagcgaatacaaccaa

SEQ ID NO: 31566 - DNA, 21 bp, Artificial Sequence
  Description of Artificial Sequence: Synthetic oligonucleotide
ggaagaagcatcatgagcgaa

SEQ ID NO: 31567 - DNA, 21 bp, Artificial Sequence
  Description of Artificial Sequence: Synthetic oligonucleotide
ggaagaagcctcctcagagaa

SEQ ID NO: 31568 - DNA, 21 bp, Artificial Sequence
  Description of Artificial Sequence: Synthetic oligonucleotide
ggaagaagcccaatccaaagc

SEQ ID NO: 31569 - DNA, 21 bp, Artificial Sequence
  Description of Artificial Sequence: Synthetic oligonucleotide
ggaagaagcagcgtcgcaaca

SEQ ID NO: 31570 - DNA, 21 bp, Artificial Sequence
  Description of Artificial Sequence: Synthetic oligonucleotide
ggaagaagcgtccaacacctc

SEQ ID NO: 31571 - DNA, 21 bp, Artificial Sequence
  Description of Artificial Sequence: Synthetic oligonucleotide
ggaagaacaggaagcccagga

SEQ ID NO: 31572 - DNA, 21 bp, Artificial Sequence
  Description of Artificial Sequence: Synthetic oligonucleotide
ggaagaacaagcggaagcagc

SEQ ID NO: 31573 - DNA, 21 bp, Artificial Sequence
  Description of Artificial Sequence: Synthetic oligonucleotide
ggaagaacaagcatggcaaca

SEQ ID NO: 31574 - DNA, 21 bp, Artificial Sequence
  Description of Artificial Sequence: Synthetic oligonucleotide
ggaagaacaagcagagcagaa

SEQ ID NO: 31575 - DNA, 21 bp, Artificial Sequence
  Description of Artificial Sequence: Synthetic oligonucleotide
ggaagaacataccaaatccca

SEQ ID NO: 31576 - DNA, 21 bp, Artificial Sequence
  Description of Artificial Sequence: Synthetic oligonucleotide
ggaagagtcctcctcctcgac

SEQ ID NO: 31577 - DNA, 21 bp, Artificial Sequence
  Description of Artificial Sequence: Synthetic oligonucleotide
ggaagagtccaagtcccacca

SEQ ID NO: 31578 - DNA, 21 bp, Artificial Sequence
  Description of Artificial Sequence: Synthetic oligonucleotide
ggaagagtcgtctacatcgac

SEQ ID NO: 31579 - DNA, 21 bp, Artificial Sequence
  Description of Artificial Sequence: Synthetic oligonucleotide
ggaagatacatggcaccactc

SEQ ID NO: 31580 - DNA, 21 bp, Artificial Sequence
  Description of Artificial Sequence: Synthetic oligonucleotide
ggaagatacagagcaggacaa

SEQ ID NO: 31581 - DNA, 21 bp, Artificial Sequence
  Description of Artificial Sequence: Synthetic oligonucleotide
ggaagcgcaatcagcgaactc

SEQ ID NO: 31582 - DNA, 21 bp, Artificial Sequence
  Description of Artificial Sequence: Synthetic oligonucleotide
ggaagcgcactcccaacaaga

SEQ ID NO: 31583 - DNA, 21 bp, Artificial Sequence
  Description of Artificial Sequence: Synthetic oligonucleotide
ggaagcgcaccagtcgtcctc

SEQ ID NO: 31584 - DNA, 21 bp, Artificial Sequence
  Description of Artificial Sequence: Synthetic oligonucleotide
ggaagcgcacaaggagcaaga

SEQ ID NO: 31585 - DNA, 21 bp, Artificial Sequence
  Description of Artificial Sequence: Synthetic oligonucleotide
ggaagcgcaagaacacaccca

SEQ ID NO: 31586 - DNA, 21 bp, Artificial Sequence
  Description of Artificial Sequence: Synthetic oligonucleotide
ggaagcgcaagcccaatgatg

SEQ ID NO: 31587 - DNA, 21 bp, Artificial Sequence
  Description of Artificial Sequence: Synthetic oligonucleotide
ggaagcgcaagcagcggattc

SEQ ID NO: 31588 - DNA, 21 bp, Artificial Sequence
  Description of Artificial Sequence: Synthetic oligonucleotide
ggaagcgacggattcagcaac

SEQ ID NO: 31589 - DNA, 21 bp, Artificial Sequence
  Description of Artificial Sequence: Synthetic oligonucleotide
ggaagcgacggacaaaaagga

SEQ ID NO: 31590 - DNA, 21 bp, Artificial Sequence
  Description of Artificial Sequence: Synthetic oligonucleotide
ggaagcgacagaatcgtcagc

SEQ ID NO: 31591 - DNA, 21 bp, Artificial Sequence
  Description of Artificial Sequence: Synthetic oligonucleotide
ggaagcgacacaccaagccca

SEQ ID NO: 31592 - DNA, 21 bp, Artificial Sequence
  Description of Artificial Sequence: Synthetic oligonucleotide
ggaagcgacacaacagaaatc

SEQ ID NO: 31593 - DNA, 21 bp, Artificial Sequence
  Description of Artificial Sequence: Synthetic oligonucleotide
ggaagcgacgtcatccacgaa

SEQ ID NO: 31594 - DNA, 21 bp, Artificial Sequence
  Description of Artificial Sequence: Synthetic oligonucleotide
ggaagcgaagtcgtcgcatgc

SEQ ID NO: 31595 - DNA, 21 bp, Artificial Sequence
  Description of Artificial Sequence: Synthetic oligonucleotide
ggaagcttcacaagccaaatc

SEQ ID NO: 31596 - DNA, 21 bp, Artificial Sequence
  Description of Artificial Sequence: Synthetic oligonucleotide
ggaagcggactcatcagagga

SEQ ID NO: 31597 - DNA, 21 bp, Artificial Sequence
  Description of Artificial Sequence: Synthetic oligonucleotide
ggaagcggaaacgacgtcctc

SEQ ID NO: 31598 - DNA, 21 bp, Artificial Sequence
  Description of Artificial Sequence: Synthetic oligonucleotide
ggaagcggaccaaacaaaagc

SEQ ID NO: 31599 - DNA, 21 bp, Artificial Sequence
  Description of Artificial Sequence: Synthetic oligonucleotide
ggaagcggaccaacaatcaga

SEQ ID NO: 31600 - DNA, 21 bp, Artificial Sequence
  Description of Artificial Sequence: Synthetic oligonucleotide
ggaagcggaccagtcgaacac

SEQ ID NO: 31601 - DNA, 21 bp, Artificial Sequence
  Description of Artificial Sequence: Synthetic oligonucleotide
ggaagcggaagcagccaaaca

SEQ ID NO: 31602 - DNA, 21 bp, Artificial Sequence
  Description of Artificial Sequence: Synthetic oligonucleotide
ggaagcggaagcacaagcgga

SEQ ID NO: 31603 - DNA, 21 bp, Artificial Sequence
  Description of Artificial Sequence: Synthetic oligonucleotide
ggaagcggaacatacacagtc

SEQ ID NO: 31604 - DNA, 21 bp, Artificial Sequence
  Description of Artificial Sequence: Synthetic oligonucleotide
ggaagccacgcagtcacaagc

SEQ ID NO: 31605 - DNA, 21 bp, Artificial Sequence
  Description of Artificial Sequence: Synthetic oligonucleotide
ggaagccaccacagcccacac

SEQ ID NO: 31606 - DNA, 21 bp, Artificial Sequence
  Description of Artificial Sequence: Synthetic oligonucleotide
ggaagccacatcacaccactc

SEQ ID NO: 31607 - DNA, 21 bp, Artificial Sequence
  Description of Artificial Sequence: Synthetic oligonucleotide
ggaagccacccaatcgtcaga

SEQ ID NO: 31608 - DNA, 21 bp, Artificial Sequence
  Description of Artificial Sequence: Synthetic oligonucleotide
ggaagccacccaagaggagaa

SEQ ID NO: 31609 - DNA, 21 bp, Artificial Sequence
  Description of Artificial Sequence: Synthetic oligonucleotide
ggaagccaccaaggacaaagc

SEQ ID NO: 31610 - DNA, 21 bp, Artificial Sequence
  Description of Artificial Sequence: Synthetic oligonucleotide
ggaagccacagcggaggacca

SEQ ID NO: 31611 - DNA, 21 bp, Artificial Sequence
  Description of Artificial Sequence: Synthetic oligonucleotide
ggaagccacagcccagcaatg

SEQ ID NO: 31612 - DNA, 21 bp, Artificial Sequence
  Description of Artificial Sequence: Synthetic oligonucleotide
ggaagccacacatggacagaa

SEQ ID NO: 31613 - DNA, 21 bp, Artificial Sequence
  Description of Artificial Sequence: Synthetic oligonucleotide
ggaagcatcggagaacaagtc

SEQ ID NO: 31614 - DNA, 21 bp, Artificial Sequence
  Description of Artificial Sequence: Synthetic oligonucleotide
ggaagcatccaagtcacagca

SEQ ID NO: 31615 - DNA, 21 bp, Artificial Sequence
  Description of Artificial Sequence: Synthetic oligonucleotide
ggaagcatcgtcctccacgaa

SEQ ID NO: 31616 - DNA, 21 bp, Artificial Sequence
  Description of Artificial Sequence: Synthetic oligonucleotide
ggaagcaaaaaccaagaaaaa

SEQ ID NO: 31617 - DNA, 21 bp, Artificial Sequence
  Description of Artificial Sequence: Synthetic oligonucleotide
ggaagcaaaccattcctcagc

SEQ ID NO: 31618 - DNA, 21 bp, Artificial Sequence
  Description of Artificial Sequence: Synthetic oligonucleotide
ggaagcaaaagacaagaccaa

SEQ ID NO: 31619 - DNA, 21 bp, Artificial Sequence
  Description of Artificial Sequence: Synthetic oligonucleotide
ggaagcaaaagcttcggaagc

SEQ ID NO: 31620 - DNA, 21 bp, Artificial Sequence
  Description of Artificial Sequence: Synthetic oligonucleotide
ggaagcaaaacattcctcagc

SEQ ID NO: 31621 - DNA, 21 bp, Artificial Sequence
  Description of Artificial Sequence: Synthetic oligonucleotide
ggaagcaaagtcgcaggactc

SEQ ID NO: 31622 - DNA, 21 bp, Artificial Sequence
  Description of Artificial Sequence: Synthetic oligonucleotide
ggaagcaaagtcggaccactc

SEQ ID NO: 31623 - DNA, 21 bp, Artificial Sequence
  Description of Artificial Sequence: Synthetic oligonucleotide
ggaagcctcgaacaaagatac

SEQ ID NO: 31624 - DNA, 21 bp, Artificial Sequence
  Description of Artificial Sequence: Synthetic oligonucleotide
ggaagcctcggacacatgaga

SEQ ID NO: 31625 - DNA, 21 bp, Artificial Sequence
  Description of Artificial Sequence: Synthetic oligonucleotide
ggaagcctcggaacacacagc

SEQ ID NO: 31626 - DNA, 21 bp, Artificial Sequence
  Description of Artificial Sequence: Synthetic oligonucleotide
ggaagcctcatcgcagcacaa

SEQ ID NO: 31627 - DNA, 21 bp, Artificial Sequence
  Description of Artificial Sequence: Synthetic oligonucleotide
ggaagcctcaacccagtccca

SEQ ID NO: 31628 - DNA, 21 bp, Artificial Sequence
  Description of Artificial Sequence: Synthetic oligonucleotide
ggaagcctcccatacagcagc

SEQ ID NO: 31629 - DNA, 21 bp, Artificial Sequence
  Description of Artificial Sequence: Synthetic oligonucleotide
ggaagcctctacagaacagaa

SEQ ID NO: 31630 - DNA, 21 bp, Artificial Sequence
  Description of Artificial Sequence: Synthetic oligonucleotide
ggaagcatggcatacctcgga

SEQ ID NO: 31631 - DNA, 21 bp, Artificial Sequence
  Description of Artificial Sequence: Synthetic oligonucleotide
ggaagcatgctcgcacaccca

SEQ ID NO: 31632 - DNA, 21 bp, Artificial Sequence
  Description of Artificial Sequence: Synthetic oligonucleotide
ggaagcatgaacccaccaagc

SEQ ID NO: 31633 - DNA, 21 bp, Artificial Sequence
  Description of Artificial Sequence: Synthetic oligonucleotide
ggaagcatgccagtcatcgtc

SEQ ID NO: 31634 - DNA, 21 bp, Artificial Sequence
  Description of Artificial Sequence: Synthetic oligonucleotide
ggaagcatgagaccaggagaa

SEQ ID NO: 31635 - DNA, 21 bp, Artificial Sequence
  Description of Artificial Sequence: Synthetic oligonucleotide
ggaagcatgagcagcgcaaac

SEQ ID NO: 31636 - DNA, 21 bp, Artificial Sequence
  Description of Artificial Sequence: Synthetic oligonucleotide
ggaagcatgacaagcctcatc

SEQ ID NO: 31637 - DNA, 21 bp, Artificial Sequence
  Description of Artificial Sequence: Synthetic oligonucleotide
ggaagcatgtacgcagtccca

SEQ ID NO: 31638 - DNA, 21 bp, Artificial Sequence
  Description of Artificial Sequence: Synthetic oligonucleotide
ggaagcaacggaggaatcagc

SEQ ID NO: 31639 - DNA, 21 bp, Artificial Sequence
  Description of Artificial Sequence: Synthetic oligonucleotide
ggaagcaacccaatgagcctc

SEQ ID NO: 31640 - DNA, 21 bp, Artificial Sequence
  Description of Artificial Sequence: Synthetic oligonucleotide
ggaagcccagcaatggcacac

SEQ ID NO: 31641 - DNA, 21 bp, Artificial Sequence
  Description of Artificial Sequence: Synthetic oligonucleotide
ggaagcccaggaagagtcgca

SEQ ID NO: 31642 - DNA, 21 bp, Artificial Sequence
  Description of Artificial Sequence: Synthetic oligonucleotide
ggaagcccaatcggaggaatg

SEQ ID NO: 31643 - DNA, 21 bp, Artificial Sequence
  Description of Artificial Sequence: Synthetic oligonucleotide
ggaagcccaaaaccacacgtc

SEQ ID NO: 31644 - DNA, 21 bp, Artificial Sequence
  Description of Artificial Sequence: Synthetic oligonucleotide
ggaagcccaatgggatacaca

SEQ ID NO: 31645 - DNA, 21 bp, Artificial Sequence
  Description of Artificial Sequence: Synthetic oligonucleotide
ggaagcccaatgccaatcatc

SEQ ID NO: 31646 - DNA, 21 bp, Artificial Sequence
  Description of Artificial Sequence: Synthetic oligonucleotide
ggaagcccaaacagctgcatg

SEQ ID NO: 31647 - DNA, 21 bp, Artificial Sequence
  Description of Artificial Sequence: Synthetic oligonucleotide
ggaagcccaccaacactcaga

SEQ ID NO: 31648 - DNA, 21 bp, Artificial Sequence
  Description of Artificial Sequence: Synthetic oligonucleotide
ggaagcccaagaagcctcagc

SEQ ID NO: 31649 - DNA, 21 bp, Artificial Sequence
  Description of Artificial Sequence: Synthetic oligonucleotide
ggaagcccaagagtcggaaca

SEQ ID NO: 31650 - DNA, 21 bp, Artificial Sequence
  Description of Artificial Sequence: Synthetic oligonucleotide
ggaagcccaagcccaatgaga

SEQ ID NO: 31651 - DNA, 21 bp, Artificial Sequence
  Description of Artificial Sequence: Synthetic oligonucleotide
ggaagcccaacaacaggaagc

SEQ ID NO: 31652 - DNA, 21 bp, Artificial Sequence
  Description of Artificial Sequence: Synthetic oligonucleotide
ggaagcccatacagccaagca

SEQ ID NO: 31653 - DNA, 21 bp, Artificial Sequence
  Description of Artificial Sequence: Synthetic oligonucleotide
ggaagccaactccacccagtc

SEQ ID NO: 31654 - DNA, 21 bp, Artificial Sequence
  Description of Artificial Sequence: Synthetic oligonucleotide
ggaagccaaccaatcagaaca

SEQ ID NO: 31655 - DNA, 21 bp, Artificial Sequence
  Description of Artificial Sequence: Synthetic oligonucleotide
ggaagccaacaactcgcagca

SEQ ID NO: 31656 - DNA, 21 bp, Artificial Sequence
  Description of Artificial Sequence: Synthetic oligonucleotide
ggaagcagagcaagcgaccca

SEQ ID NO: 31657 - DNA, 21 bp, Artificial Sequence
  Description of Artificial Sequence: Synthetic oligonucleotide
ggaagcagactccaacacgac

SEQ ID NO: 31658 - DNA, 21 bp, Artificial Sequence
  Description of Artificial Sequence: Synthetic oligonucleotide
ggaagcagaaacttcccaaca

SEQ ID NO: 31659 - DNA, 21 bp, Artificial Sequence
  Description of Artificial Sequence: Synthetic oligonucleotide
ggaagcagaaactacatcgca

SEQ ID NO: 31660 - DNA, 21 bp, Artificial Sequence
  Description of Artificial Sequence: Synthetic oligonucleotide
ggaagcagaccaggaagcctc

SEQ ID NO: 31661 - DNA, 21 bp, Artificial Sequence
  Description of Artificial Sequence: Synthetic oligonucleotide
ggaagcagacaaccagcagac

SEQ ID NO: 31662 - DNA, 21 bp, Artificial Sequence
  Description of Artificial Sequence: Synthetic oligonucleotide
ggaagcagaacattcacagga

SEQ ID NO: 31663 - DNA, 21 bp, Artificial Sequence
  Description of Artificial Sequence: Synthetic oligonucleotide
ggaagcagaacaggaccaaca

SEQ ID NO: 31664 - DNA, 21 bp, Artificial Sequence
  Description of Artificial Sequence: Synthetic oligonucleotide
ggaagcagagtcagcggagaa

SEQ ID NO: 31665 - DNA, 21 bp, Artificial Sequence
  Description of Artificial Sequence: Synthetic oligonucleotide
ggaagcagcgcaacagtcttc

SEQ ID NO: 31666 - DNA, 21 bp, Artificial Sequence
  Description of Artificial Sequence: Synthetic oligonucleotide
ggaagcagcgacacatgcgtc

SEQ ID NO: 31667 - DNA, 21 bp, Artificial Sequence
  Description of Artificial Sequence: Synthetic oligonucleotide
ggaagcagcggaatcgcaaga

SEQ ID NO: 31668 - DNA, 21 bp, Artificial Sequence
  Description of Artificial Sequence: Synthetic oligonucleotide
ggaagcagccacggaatcctc

SEQ ID NO: 31669 - DNA, 21 bp, Artificial Sequence
  Description of Artificial Sequence: Synthetic oligonucleotide
ggaagcagcatgccaccacca

SEQ ID NO: 31670 - DNA, 21 bp, Artificial Sequence
  Description of Artificial Sequence: Synthetic oligonucleotide
ggaagcagcccagcaagaaca

SEQ ID NO: 31671 - DNA, 21 bp, Artificial Sequence
  Description of Artificial Sequence: Synthetic oligonucleotide
ggaagcagcccactccacaaa

SEQ ID NO: 31672 - DNA, 21 bp, Artificial Sequence
  Description of Artificial Sequence: Synthetic oligonucleotide
ggaagcagcccagtcggagca

SEQ ID NO: 31673 - DNA, 21 bp, Artificial Sequence
  Description of Artificial Sequence: Synthetic oligonucleotide
ggaagcagccaactcttcctc

SEQ ID NO: 31674 - DNA, 21 bp, Artificial Sequence
  Description of Artificial Sequence: Synthetic oligonucleotide
ggaagcagcagagcagacgca

SEQ ID NO: 31675 - DNA, 21 bp, Artificial Sequence
  Description of Artificial Sequence: Synthetic oligonucleotide
ggaagcagcagccacgtcagc

SEQ ID NO: 31676 - DNA, 21 bp, Artificial Sequence
  Description of Artificial Sequence: Synthetic oligonucleotide
ggaagcagcagcatcgcaagc

SEQ ID NO: 31677 - DNA, 21 bp, Artificial Sequence
  Description of Artificial Sequence: Synthetic oligonucleotide
ggaagcagcagcctccacagc

SEQ ID NO: 31678 - DNA, 21 bp, Artificial Sequence
  Description of Artificial Sequence: Synthetic oligonucleotide
ggaagcagcagcaacgcaaga

SEQ ID NO: 31679 - DNA, 21 bp, Artificial Sequence
  Description of Artificial Sequence: Synthetic oligonucleotide
ggaagcagctaccacagccca

SEQ ID NO: 31680 - DNA, 21 bp, Artificial Sequence
  Description of Artificial Sequence: Synthetic oligonucleotide
ggaagcacaggagacagacaa

SEQ ID NO: 31681 - DNA, 21 bp, Artificial Sequence
  Description of Artificial Sequence: Synthetic oligonucleotide
ggaagcacaggaaacacagtc

SEQ ID NO: 31682 - DNA, 21 bp, Artificial Sequence
  Description of Artificial Sequence: Synthetic oligonucleotide
ggaagcacaggaagcgcagca

SEQ ID NO: 31683 - DNA, 21 bp, Artificial Sequence
  Description of Artificial Sequence: Synthetic oligonucleotide
ggaagcacaggaagcggacac

SEQ ID NO: 31684 - DNA, 21 bp, Artificial Sequence
  Description of Artificial Sequence: Synthetic oligonucleotide
ggaagcacaatgacaatcgca

SEQ ID NO: 31685 - DNA, 21 bp, Artificial Sequence
  Description of Artificial Sequence: Synthetic oligonucleotide
ggaagcacaaacgaactcgtc

SEQ ID NO: 31686 - DNA, 21 bp, Artificial Sequence
  Description of Artificial Sequence: Synthetic oligonucleotide
ggaagcacaaacccactcgca

SEQ ID NO: 31687 - DNA, 21 bp, Artificial Sequence
  Description of Artificial Sequence: Synthetic oligonucleotide
ggaagcacaaacagactcgca

SEQ ID NO: 31688 - DNA, 21 bp, Artificial Sequence
  Description of Artificial Sequence: Synthetic oligonucleotide
ggaagcacaaacagcccagca

SEQ ID NO: 31689 - DNA, 21 bp, Artificial Sequence
  Description of Artificial Sequence: Synthetic oligonucleotide
ggaagcacaccactcccactc

SEQ ID NO: 31690 - DNA, 21 bp, Artificial Sequence
  Description of Artificial Sequence: Synthetic oligonucleotide
ggaagcacacaaggaagcgga

SEQ ID NO: 31691 - DNA, 21 bp, Artificial Sequence
  Description of Artificial Sequence: Synthetic oligonucleotide
ggaagcacaagcaaagacaga

SEQ ID NO: 31692 - DNA, 21 bp, Artificial Sequence
  Description of Artificial Sequence: Synthetic oligonucleotide
ggaagcacaagcagcagaaca

SEQ ID NO: 31693 - DNA, 21 bp, Artificial Sequence
  Description of Artificial Sequence: Synthetic oligonucleotide
ggaagcacaacaagaccacaa

SEQ ID NO: 31694 - DNA, 21 bp, Artificial Sequence
  Description of Artificial Sequence: Synthetic oligonucleotide
ggaagcacatggagcagccca

SEQ ID NO: 31695 - DNA, 21 bp, Artificial Sequence
  Description of Artificial Sequence: Synthetic oligonucleotide
ggaagcacatacgcaagcatg

SEQ ID NO: 31696 - DNA, 21 bp, Artificial Sequence
  Description of Artificial Sequence: Synthetic oligonucleotide
ggaagcgtcgcagacagagtc

SEQ ID NO: 31697 - DNA, 21 bp, Artificial Sequence
  Description of Artificial Sequence: Synthetic oligonucleotide
ggaagcgtcgcaacaaaccca

SEQ ID NO: 31698 - DNA, 21 bp, Artificial Sequence
  Description of Artificial Sequence: Synthetic oligonucleotide
ggaagcgtcgaagaaagcaga

SEQ ID NO: 31699 - DNA, 21 bp, Artificial Sequence
  Description of Artificial Sequence: Synthetic oligonucleotide
ggaagcgtcaacccaagaagc

SEQ ID NO: 31700 - DNA, 21 bp, Artificial Sequence
  Description of Artificial Sequence: Synthetic oligonucleotide
ggaagcgtcccagacagcaga

SEQ ID NO: 31701 - DNA, 21 bp, Artificial Sequence
  Description of Artificial Sequence: Synthetic oligonucleotide
ggaagcgtcccaaacgtcatc

SEQ ID NO: 31702 - DNA, 21 bp, Artificial Sequence
  Description of Artificial Sequence: Synthetic oligonucleotide
ggaagcgtccaaatcagacca

SEQ ID NO: 31703 - DNA, 21 bp, Artificial Sequence
  Description of Artificial Sequence: Synthetic oligonucleotide
ggaagctacgcaaacgcagca

SEQ ID NO: 31704 - DNA, 21 bp, Artificial Sequence
  Description of Artificial Sequence: Synthetic oligonucleotide
ggaacagcagacctcgtccca

SEQ ID NO: 31705 - DNA, 21 bp, Artificial Sequence
  Description of Artificial Sequence: Synthetic oligonucleotide
ggaacagcacacctcaaacca

SEQ ID NO: 31706 - DNA, 21 bp, Artificial Sequence
  Description of Artificial Sequence: Synthetic oligonucleotide
ggaacagcaaacagaaacgca

SEQ ID NO: 31707 - DNA, 21 bp, Artificial Sequence
  Description of Artificial Sequence: Synthetic oligonucleotide
ggaacagcaccaagcgtcatg

SEQ ID NO: 31708 - DNA, 21 bp, Artificial Sequence
  Description of Artificial Sequence: Synthetic oligonucleotide
ggaacagcagtccaaagactc

SEQ ID NO: 31709 - DNA, 21 bp, Artificial Sequence
  Description of Artificial Sequence: Synthetic oligonucleotide
ggaacagacttcgtcccaagc

SEQ ID NO: 31710 - DNA, 21 bp, Artificial Sequence
  Description of Artificial Sequence: Synthetic oligonucleotide
ggaacagacatcagaatgcca

SEQ ID NO: 31711 - DNA, 21 bp, Artificial Sequence
  Description of Artificial Sequence: Synthetic oligonucleotide
ggaacagaagaattcggatac

SEQ ID NO: 31712 - DNA, 21 bp, Artificial Sequence
  Description of Artificial Sequence: Synthetic oligonucleotide
ggaacagaacacacaacagca

SEQ ID NO: 31713 - DNA, 21 bp, Artificial Sequence
  Description of Artificial Sequence: Synthetic oligonucleotide
ggaacagaaagcaacggaaga

SEQ ID NO: 31714 - DNA, 21 bp, Artificial Sequence
  Description of Artificial Sequence: Synthetic oligonucleotide
ggaacagaatacaacacatgc

SEQ ID NO: 31715 - DNA, 21 bp, Artificial Sequence
  Description of Artificial Sequence: Synthetic oligonucleotide
ggaacattcggaacaacagca

SEQ ID NO: 31716 - DNA, 21 bp, Artificial Sequence
  Description of Artificial Sequence: Synthetic oligonucleotide
ggaacattcaaagcaagccac

SEQ ID NO: 31717 - DNA, 21 bp, Artificial Sequence
  Description of Artificial Sequence: Synthetic oligonucleotide
ggaacaggaggagtcaaaatc

SEQ ID NO: 31718 - DNA, 21 bp, Artificial Sequence
  Description of Artificial Sequence: Synthetic oligonucleotide
ggaacaggaatcaaccacctc

SEQ ID NO: 31719 - DNA, 21 bp, Artificial Sequence
  Description of Artificial Sequence: Synthetic oligonucleotide
ggaacaggaaaaccaatggga

SEQ ID NO: 31720 - DNA, 21 bp, Artificial Sequence
  Description of Artificial Sequence: Synthetic oligonucleotide
ggaacaggaaacgtcggagca

SEQ ID NO: 31721 - DNA, 21 bp, Artificial Sequence
  Description of Artificial Sequence: Synthetic oligonucleotide
ggaacaggaccaagcgtccca

SEQ ID NO: 31722 - DNA, 21 bp, Artificial Sequence
  Description of Artificial Sequence: Synthetic oligonucleotide
ggaacaggaagagacggaagc

SEQ ID NO: 31723 - DNA, 21 bp, Artificial Sequence
  Description of Artificial Sequence: Synthetic oligonucleotide
ggaacaggaagcagagtcgtc

SEQ ID NO: 31724 - DNA, 21 bp, Artificial Sequence
  Description of Artificial Sequence: Synthetic oligonucleotide
ggaacaatctacggaccagtc

SEQ ID NO: 31725 - DNA, 21 bp, Artificial Sequence
  Description of Artificial Sequence: Synthetic oligonucleotide
ggaacaaaactctacacaaca

SEQ ID NO: 31726 - DNA, 21 bp, Artificial Sequence
  Description of Artificial Sequence: Synthetic oligonucleotide
ggaacaaaatacgcagcaagc

SEQ ID NO: 31727 - DNA, 21 bp, Artificial Sequence
  Description of Artificial Sequence: Synthetic oligonucleotide
ggaacactcgacacagtcatc

SEQ ID NO: 31728 - DNA, 21 bp, Artificial Sequence
  Description of Artificial Sequence: Synthetic oligonucleotide
ggaacactcgaatacagcatg

SEQ ID NO: 31729 - DNA, 21 bp, Artificial Sequence
  Description of Artificial Sequence: Synthetic oligonucleotide
ggaacactcggatgcagagaa

SEQ ID NO: 31730 - DNA, 21 bp, Artificial Sequence
  Description of Artificial Sequence: Synthetic oligonucleotide
ggaacactcggactcagacaa

SEQ ID NO: 31731 - DNA, 21 bp, Artificial Sequence
  Description of Artificial Sequence: Synthetic oligonucleotide
ggaacactccacggaagcgaa

SEQ ID NO: 31732 - DNA, 21 bp, Artificial Sequence
  Description of Artificial Sequence: Synthetic oligonucleotide
ggaacactcaactacgcaagc

SEQ ID NO: 31733 - DNA, 21 bp, Artificial Sequence
  Description of Artificial Sequence: Synthetic oligonucleotide
ggaacactcagcggactcgaa

SEQ ID NO: 31734 - DNA, 21 bp, Artificial Sequence
  Description of Artificial Sequence: Synthetic oligonucleotide
ggaacactcacaccaacaatg

SEQ ID NO: 31735 - DNA, 21 bp, Artificial Sequence
  Description of Artificial Sequence: Synthetic oligonucleotide
ggaacaatgaacgtcgtcatc

SEQ ID NO: 31736 - DNA, 21 bp, Artificial Sequence
  Description of Artificial Sequence: Synthetic oligonucleotide
ggaacaatgagcctcggacca

SEQ ID NO: 31737 - DNA, 21 bp, Artificial Sequence
  Description of Artificial Sequence: Synthetic oligonucleotide
ggaacaatgacaaacagcgca

SEQ ID NO: 31738 - DNA, 21 bp, Artificial Sequence
  Description of Artificial Sequence: Synthetic oligonucleotide
ggaacaaacggactcatgctc

SEQ ID NO: 31739 - DNA, 21 bp, Artificial Sequence
  Description of Artificial Sequence: Synthetic oligonucleotide
ggaacaaacggactcccagca

SEQ ID NO: 31740 - DNA, 21 bp, Artificial Sequence
  Description of Artificial Sequence: Synthetic oligonucleotide
ggaacaaaccacgcacaaaaa

SEQ ID NO: 31741 - DNA, 21 bp, Artificial Sequence
  Description of Artificial Sequence: Synthetic oligonucleotide
ggaacaaacccagtcctcaca

SEQ ID NO: 31742 - DNA, 21 bp, Artificial Sequence
  Description of Artificial Sequence: Synthetic oligonucleotide
ggaacaccagcacacgcagca

SEQ ID NO: 31743 - DNA, 21 bp, Artificial Sequence
  Description of Artificial Sequence: Synthetic oligonucleotide
ggaacaccagaaagactccca

SEQ ID NO: 31744 - DNA, 21 bp, Artificial Sequence
  Description of Artificial Sequence: Synthetic oligonucleotide
ggaacaccaatgacacaagga

SEQ ID NO: 31745 - DNA, 21 bp, Artificial Sequence
  Description of Artificial Sequence: Synthetic oligonucleotide
ggaacaccaaacaacagaaac

SEQ ID NO: 31746 - DNA, 21 bp, Artificial Sequence
  Description of Artificial Sequence: Synthetic oligonucleotide
ggaacaccaaacgtccacgga

SEQ ID NO: 31747 - DNA, 21 bp, Artificial Sequence
  Description of Artificial Sequence: Synthetic oligonucleotide
ggaacaccaccaggaccaagc

SEQ ID NO: 31748 - DNA, 21 bp, Artificial Sequence
  Description of Artificial Sequence: Synthetic oligonucleotide
ggaacaccaccaacaagactc

SEQ ID NO: 31749 - DNA, 21 bp, Artificial Sequence
  Description of Artificial Sequence: Synthetic oligonucleotide
ggaacaccagtcgtcgactgc

SEQ ID NO: 31750 - DNA, 21 bp, Artificial Sequence
  Description of Artificial Sequence: Synthetic oligonucleotide
ggaacacaagcagaaagacaa

SEQ ID NO: 31751 - DNA, 21 bp, Artificial Sequence
  Description of Artificial Sequence: Synthetic oligonucleotide
ggaacacaagcaagaatctgc

SEQ ID NO: 31752 - DNA, 21 bp, Artificial Sequence
  Description of Artificial Sequence: Synthetic oligonucleotide
ggaacacaaatggcaagagca

SEQ ID NO: 31753 - DNA, 21 bp, Artificial Sequence
  Description of Artificial Sequence: Synthetic oligonucleotide
ggaacacaaagcacatacgac

SEQ ID NO: 31754 - DNA, 21 bp, Artificial Sequence
  Description of Artificial Sequence: Synthetic oligonucleotide
ggaacaagaccagcacacgtc

SEQ ID NO: 31755 - DNA, 21 bp, Artificial Sequence
  Description of Artificial Sequence: Synthetic oligonucleotide
ggaacaagaagcacattcgca

SEQ ID NO: 31756 - DNA, 21 bp, Artificial Sequence
  Description of Artificial Sequence: Synthetic oligonucleotide
ggaacaagaacagtcgtcctc

SEQ ID NO: 31757 - DNA, 21 bp, Artificial Sequence
  Description of Artificial Sequence: Synthetic oligonucleotide
ggaacaagagtcctcagctac

SEQ ID NO: 31758 - DNA, 21 bp, Artificial Sequence
  Description of Artificial Sequence: Synthetic oligonucleotide
ggaacaagcggatacagccca

SEQ ID NO: 31759 - DNA, 21 bp, Artificial Sequence
  Description of Artificial Sequence: Synthetic oligonucleotide
ggaacaagcaacctcagccca

SEQ ID NO: 31760 - DNA, 21 bp, Artificial Sequence
  Description of Artificial Sequence: Synthetic oligonucleotide
ggaacaagcccagaccaaaaa

SEQ ID NO: 31761 - DNA, 21 bp, Artificial Sequence
  Description of Artificial Sequence: Synthetic oligonucleotide
ggaacaagcccagtcatgtgc

SEQ ID NO: 31762 - DNA, 21 bp, Artificial Sequence
  Description of Artificial Sequence: Synthetic oligonucleotide
ggaacaagccaaaaactccca

SEQ ID NO: 31763 - DNA, 21 bp, Artificial Sequence
  Description of Artificial Sequence: Synthetic oligonucleotide
ggaacaagccaaaaaacaagc

SEQ ID NO: 31764 - DNA, 21 bp, Artificial Sequence
  Description of Artificial Sequence: Synthetic oligonucleotide
ggaacaagcagcagagcacca

SEQ ID NO: 31765 - DNA, 21 bp, Artificial Sequence
  Description of Artificial Sequence: Synthetic oligonucleotide
ggaacaagcagcagcggactc

SEQ ID NO: 31766 - DNA, 21 bp, Artificial Sequence
  Description of Artificial Sequence: Synthetic oligonucleotide
ggaacaacagaaatccacagc

SEQ ID NO: 31767 - DNA, 21 bp, Artificial Sequence
  Description of Artificial Sequence: Synthetic oligonucleotide
ggaacaacacacacaaacatc

SEQ ID NO: 31768 - DNA, 21 bp, Artificial Sequence
  Description of Artificial Sequence: Synthetic oligonucleotide
ggaacaacaaaactcggacca

SEQ ID NO: 31769 - DNA, 21 bp, Artificial Sequence
  Description of Artificial Sequence: Synthetic oligonucleotide
ggaacaacaatggtcccagca

SEQ ID NO: 31770 - DNA, 21 bp, Artificial Sequence
  Description of Artificial Sequence: Synthetic oligonucleotide
ggaacaacaaacctcgcagga

SEQ ID NO: 31771 - DNA, 21 bp, Artificial Sequence
  Description of Artificial Sequence: Synthetic oligonucleotide
ggaacaacaaacaacatgttc

SEQ ID NO: 31772 - DNA, 21 bp, Artificial Sequence
  Description of Artificial Sequence: Synthetic oligonucleotide
ggaacaacaaacaacaacgca

SEQ ID NO: 31773 - DNA, 21 bp, Artificial Sequence
  Description of Artificial Sequence: Synthetic oligonucleotide
ggaacaacaagcgcagaaagc

SEQ ID NO: 31774 - DNA, 21 bp, Artificial Sequence
  Description of Artificial Sequence: Synthetic oligonucleotide
ggaacaacaagcccaaaaagc

SEQ ID NO: 31775 - DNA, 21 bp, Artificial Sequence
  Description of Artificial Sequence: Synthetic oligonucleotide
ggaacaacaagcagccacgaa

SEQ ID NO: 31776 - DNA, 21 bp, Artificial Sequence
  Description of Artificial Sequence: Synthetic oligonucleotide
ggaacaacaacaggacacagc

SEQ ID NO: 31777 - DNA, 21 bp, Artificial Sequence
  Description of Artificial Sequence: Synthetic oligonucleotide
ggaacagtcgacagaggacaa

SEQ ID NO: 31778 - DNA, 21 bp, Artificial Sequence
  Description of Artificial Sequence: Synthetic oligonucleotide
ggaacagtcggactcaacgtc

SEQ ID NO: 31779 - DNA, 21 bp, Artificial Sequence
  Description of Artificial Sequence: Synthetic oligonucleotide
ggaacagtcggaagcgacaga

SEQ ID NO: 31780 - DNA, 21 bp, Artificial Sequence
  Description of Artificial Sequence: Synthetic oligonucleotide
ggaacagtccacaacaacctc

SEQ ID NO: 31781 - DNA, 21 bp, Artificial Sequence
  Description of Artificial Sequence: Synthetic oligonucleotide
ggaacagtccacacaaacgca

SEQ ID NO: 31782 - DNA, 21 bp, Artificial Sequence
  Description of Artificial Sequence: Synthetic oligonucleotide
ggaacagtcccagaaggacca

SEQ ID NO: 31783 - DNA, 21 bp, Artificial Sequence
  Description of Artificial Sequence: Synthetic oligonucleotide
ggaacagtccaaaaaagcgac

SEQ ID NO: 31784 - DNA, 21 bp, Artificial Sequence
  Description of Artificial Sequence: Synthetic oligonucleotide
ggaacagtcagaagcgcagtc

SEQ ID NO: 31785 - DNA, 21 bp, Artificial Sequence
  Description of Artificial Sequence: Synthetic oligonucleotide
ggaacatacgcaaacgcagtc

SEQ ID NO: 31786 - DNA, 21 bp, Artificial Sequence
  Description of Artificial Sequence: Synthetic oligonucleotide
ggaacatacgtcgaaagcaca

SEQ ID NO: 31787 - DNA, 21 bp, Artificial Sequence
  Description of Artificial Sequence: Synthetic oligonucleotide
ggagtcgcacacgaaaaaaac

SEQ ID NO: 31788 - DNA, 21 bp, Artificial Sequence
  Description of Artificial Sequence: Synthetic oligonucleotide
ggagtcgcaaaactcctcgca

SEQ ID NO: 31789 - DNA, 21 bp, Artificial Sequence
  Description of Artificial Sequence: Synthetic oligonucleotide
ggagtcgcaagcagcccagga

SEQ ID NO: 31790 - DNA, 21 bp, Artificial Sequence
  Description of Artificial Sequence: Synthetic oligonucleotide
ggagtcgcaagcacaagagca

SEQ ID NO: 31791 - DNA, 21 bp, Artificial Sequence
  Description of Artificial Sequence: Synthetic oligonucleotide
ggagtcgcaacactcacactc

SEQ ID NO: 31792 - DNA, 21 bp, Artificial Sequence
  Description of Artificial Sequence: Synthetic oligonucleotide
ggagtcgcagtcacagaaaga

SEQ ID NO: 31793 - DNA, 21 bp, Artificial Sequence
  Description of Artificial Sequence: Synthetic oligonucleotide
ggagtctgcgcagaaagctgg

SEQ ID NO: 31794 - DNA, 21 bp, Artificial Sequence
  Description of Artificial Sequence: Synthetic oligonucleotide
ggagtcgacgtcaaatggagc

SEQ ID NO: 31795 - DNA, 21 bp, Artificial Sequence
  Description of Artificial Sequence: Synthetic oligonucleotide
ggagtcgaagcaatgagagca

SEQ ID NO: 31796 - DNA, 21 bp, Artificial Sequence
  Description of Artificial Sequence: Synthetic oligonucleotide
ggagtcgaacacaacgacagc

SEQ ID NO: 31797 - DNA, 21 bp, Artificial Sequence
  Description of Artificial Sequence: Synthetic oligonucleotide
ggagtcttcaaagaaacagga

SEQ ID NO: 31798 - DNA, 21 bp, Artificial Sequence
  Description of Artificial Sequence: Synthetic oligonucleotide
ggagtcggagcaagccacatc

SEQ ID NO: 31799 - DNA, 21 bp, Artificial Sequence
  Description of Artificial Sequence: Synthetic oligonucleotide
ggagtcggagcaagcagaagc

SEQ ID NO: 31800 - DNA, 21 bp, Artificial Sequence
  Description of Artificial Sequence: Synthetic oligonucleotide
ggagtcggaaacatgccagac

SEQ ID NO: 31801 - DNA, 21 bp, Artificial Sequence
  Description of Artificial Sequence: Synthetic oligonucleotide
ggagtcggacaagtcagaagc

SEQ ID NO: 31802 - DNA, 21 bp, Artificial Sequence
  Description of Artificial Sequence: Synthetic oligonucleotide
ggagtccacctcagcagccca

SEQ ID NO: 31803 - DNA, 21 bp, Artificial Sequence
  Description of Artificial Sequence: Synthetic oligonucleotide
ggagtccacagcatggtcgaa

SEQ ID NO: 31804 - DNA, 21 bp, Artificial Sequence
  Description of Artificial Sequence: Synthetic oligonucleotide
ggagtccacgtcaaaccagaa

SEQ ID NO: 31805 - DNA, 21 bp, Artificial Sequence
  Description of Artificial Sequence: Synthetic oligonucleotide
ggagtcatcgcacaccacagc

SEQ ID NO: 31806 - DNA, 21 bp, Artificial Sequence
  Description of Artificial Sequence: Synthetic oligonucleotide
ggagtcatcctcgcaagaatg

SEQ ID NO: 31807 - DNA, 21 bp, Artificial Sequence
  Description of Artificial Sequence: Synthetic oligonucleotide
ggagtcatcaacccaacactc

SEQ ID NO: 31808 - DNA, 21 bp, Artificial Sequence
  Description of Artificial Sequence: Synthetic oligonucleotide
ggagtcaaagcaagcatcctc

SEQ ID NO: 31809 - DNA, 21 bp, Artificial Sequence
  Description of Artificial Sequence: Synthetic oligonucleotide
ggagtcaaattcggaggaagc

SEQ ID NO: 31810 - DNA, 21 bp, Artificial Sequence
  Description of Artificial Sequence: Synthetic oligonucleotide
ggagtcaaacacggacactac

SEQ ID NO: 31811 - DNA, 21 bp, Artificial Sequence
  Description of Artificial Sequence: Synthetic oligonucleotide
ggagtcaaactcagcccaagc

SEQ ID NO: 31812 - DNA, 21 bp, Artificial Sequence
  Description of Artificial Sequence: Synthetic oligonucleotide
ggagtcaaaccagacccagtc

SEQ ID NO: 31813 - DNA, 21 bp, Artificial Sequence
  Description of Artificial Sequence: Synthetic oligonucleotide
ggagtcctcggaccaccactc

SEQ ID NO: 31814 - DNA, 21 bp, Artificial Sequence
  Description of Artificial Sequence: Synthetic oligonucleotide
ggagtcctcagaatgagcagc

SEQ ID NO: 31815 - DNA, 21 bp, Artificial Sequence
  Description of Artificial Sequence: Synthetic oligonucleotide
ggagtcctcacaaacatcctc

SEQ ID NO: 31816 - DNA, 21 bp, Artificial Sequence
  Description of Artificial Sequence: Synthetic oligonucleotide
ggagtcaacgaaagaaacgtc

SEQ ID NO: 31817 - DNA, 21 bp, Artificial Sequence
  Description of Artificial Sequence: Synthetic oligonucleotide
ggagtcaacatcacaagcctc

SEQ ID NO: 31818 - DNA, 21 bp, Artificial Sequence
  Description of Artificial Sequence: Synthetic oligonucleotide
ggagtcaacccaagcagactc

SEQ ID NO: 31819 - DNA, 21 bp, Artificial Sequence
  Description of Artificial Sequence: Synthetic oligonucleotide
ggagtcccagcaacaagctac

SEQ ID NO: 31820 - DNA, 21 bp, Artificial Sequence
  Description of Artificial Sequence: Synthetic oligonucleotide
ggagtcccaggaatcagcgca

SEQ ID NO: 31821 - DNA, 21 bp, Artificial Sequence
  Description of Artificial Sequence: Synthetic oligonucleotide
ggagtcccaatccaaacacca

SEQ ID NO: 31822 - DNA, 21 bp, Artificial Sequence
  Description of Artificial Sequence: Synthetic oligonucleotide
ggagtcagagacatgggactc

SEQ ID NO: 31823 - DNA, 21 bp, Artificial Sequence
  Description of Artificial Sequence: Synthetic oligonucleotide
ggagtcagaggagcaccactc

SEQ ID NO: 31824 - DNA, 21 bp, Artificial Sequence
  Description of Artificial Sequence: Synthetic oligonucleotide
ggagtcagactcgacgcaaca

SEQ ID NO: 31825 - DNA, 21 bp, Artificial Sequence
  Description of Artificial Sequence: Synthetic oligonucleotide
ggagtcagactcaacgaaaca

SEQ ID NO: 31826 - DNA, 21 bp, Artificial Sequence
  Description of Artificial Sequence: Synthetic oligonucleotide
ggagtcagactccaaaacgca

SEQ ID NO: 31827 - DNA, 21 bp, Artificial Sequence
  Description of Artificial Sequence: Synthetic oligonucleotide
ggagtcagaagccacacaatg

SEQ ID NO: 31828 - DNA, 21 bp, Artificial Sequence
  Description of Artificial Sequence: Synthetic oligonucleotide
ggagtcagcttccaaagcatg

SEQ ID NO: 31829 - DNA, 21 bp, Artificial Sequence
  Description of Artificial Sequence: Synthetic oligonucleotide
ggagtcagcaaaatcgacagc

SEQ ID NO: 31830 - DNA, 21 bp, Artificial Sequence
  Description of Artificial Sequence: Synthetic oligonucleotide
ggagtcagcagaagcgcaaac

SEQ ID NO: 31831 - DNA, 21 bp, Artificial Sequence
  Description of Artificial Sequence: Synthetic oligonucleotide
ggagtcagcagcagccaaaga

SEQ ID NO: 31832 - DNA, 21 bp, Artificial Sequence
  Description of Artificial Sequence: Synthetic oligonucleotide
ggagtcagcagcgtccaaagc

SEQ ID NO: 31833 - DNA, 21 bp, Artificial Sequence
  Description of Artificial Sequence: Synthetic oligonucleotide
ggagtcagcacagcaagaatc

SEQ ID NO: 31834 - DNA, 21 bp, Artificial Sequence
  Description of Artificial Sequence: Synthetic oligonucleotide
ggagtcagcgtcagcagacca

SEQ ID NO: 31835 - DNA, 21 bp, Artificial Sequence
  Description of Artificial Sequence: Synthetic oligonucleotide
ggagtcacaaaagcagtcagc

SEQ ID NO: 31836 - DNA, 21 bp, Artificial Sequence
  Description of Artificial Sequence: Synthetic oligonucleotide
ggagtcacaccaagctacagc

SEQ ID NO: 31837 - DNA, 21 bp, Artificial Sequence
  Description of Artificial Sequence: Synthetic oligonucleotide
ggagtcacacaagcaacagca

SEQ ID NO: 31838 - DNA, 21 bp, Artificial Sequence
  Description of Artificial Sequence: Synthetic oligonucleotide
ggagtcacaagcggaggagga

SEQ ID NO: 31839 - DNA, 21 bp, Artificial Sequence
  Description of Artificial Sequence: Synthetic oligonucleotide
ggagtcacaagcacaagcagc

SEQ ID NO: 31840 - DNA, 21 bp, Artificial Sequence
  Description of Artificial Sequence: Synthetic oligonucleotide
ggagtcacaacaagcatccac

SEQ ID NO: 31841 - DNA, 21 bp, Artificial Sequence
  Description of Artificial Sequence: Synthetic oligonucleotide
ggagtcacaacatacagcgca

SEQ ID NO: 31842 - DNA, 21 bp, Artificial Sequence
  Description of Artificial Sequence: Synthetic oligonucleotide
ggagtcgtcggaagccaccac

SEQ ID NO: 31843 - DNA, 21 bp, Artificial Sequence
  Description of Artificial Sequence: Synthetic oligonucleotide
ggagtcgtccacacaagaaca

SEQ ID NO: 31844 - DNA, 21 bp, Artificial Sequence
  Description of Artificial Sequence: Synthetic oligonucleotide
ggatgggcactcacaaacgga

SEQ ID NO: 31845 - DNA, 21 bp, Artificial Sequence
  Description of Artificial Sequence: Synthetic oligonucleotide
ggatgggaaccaacaagcgac

SEQ ID NO: 31846 - DNA, 21 bp, Artificial Sequence
  Description of Artificial Sequence: Synthetic oligonucleotide
ggatggggagcagaaacaatc

SEQ ID NO: 31847 - DNA, 21 bp, Artificial Sequence
  Description of Artificial Sequence: Synthetic oligonucleotide
ggatggggactcgtcaacgac

SEQ ID NO: 31848 - DNA, 21 bp, Artificial Sequence
  Description of Artificial Sequence: Synthetic oligonucleotide
ggatggcacccagcactccca

SEQ ID NO: 31849 - DNA, 21 bp, Artificial Sequence
  Description of Artificial Sequence: Synthetic oligonucleotide
ggatggaaaggacacgcagac

SEQ ID NO: 31850 - DNA, 21 bp, Artificial Sequence
  Description of Artificial Sequence: Synthetic oligonucleotide
ggatggaacgcagacgcaagc

SEQ ID NO: 31851 - DNA, 21 bp, Artificial Sequence
  Description of Artificial Sequence: Synthetic oligonucleotide
ggatggaacgtcgacggactc

SEQ ID NO: 31852 - DNA, 21 bp, Artificial Sequence
  Description of Artificial Sequence: Synthetic oligonucleotide
ggatggccaccaaaatacgaa

SEQ ID NO: 31853 - DNA, 21 bp, Artificial Sequence
  Description of Artificial Sequence: Synthetic oligonucleotide
ggatggcaaggacacaacctc

SEQ ID NO: 31854 - DNA, 21 bp, Artificial Sequence
  Description of Artificial Sequence: Synthetic oligonucleotide
ggatggagagaagtcgtcgac

SEQ ID NO: 31855 - DNA, 21 bp, Artificial Sequence
  Description of Artificial Sequence: Synthetic oligonucleotide
ggatggagaagcgaactcgaa

SEQ ID NO: 31856 - DNA, 21 bp, Artificial Sequence
  Description of Artificial Sequence: Synthetic oligonucleotide
ggatggagcagcgcaggacac

SEQ ID NO: 31857 - DNA, 21 bp, Artificial Sequence
  Description of Artificial Sequence: Synthetic oligonucleotide
ggatacgcaatgccagtccca

SEQ ID NO: 31858 - DNA, 21 bp, Artificial Sequence
  Description of Artificial Sequence: Synthetic oligonucleotide
ggatacgcaatgagcagcagc

SEQ ID NO: 31859 - DNA, 21 bp, Artificial Sequence
  Description of Artificial Sequence: Synthetic oligonucleotide
ggatacgcaacaacagtccac

SEQ ID NO: 31860 - DNA, 21 bp, Artificial Sequence
  Description of Artificial Sequence: Synthetic oligonucleotide
ggatacgacttcaacccagga

SEQ ID NO: 31861 - DNA, 21 bp, Artificial Sequence
  Description of Artificial Sequence: Synthetic oligonucleotide
ggatacggaccaatgagacaa

SEQ ID NO: 31862 - DNA, 21 bp, Artificial Sequence
  Description of Artificial Sequence: Synthetic oligonucleotide
ggatacggacaagcatacaca

SEQ ID NO: 31863 - DNA, 21 bp, Artificial Sequence
  Description of Artificial Sequence: Synthetic oligonucleotide
ggatacatccacgtcagcgga

SEQ ID NO: 31864 - DNA, 21 bp, Artificial Sequence
  Description of Artificial Sequence: Synthetic oligonucleotide
ggatacaaaacagcaacacaa

SEQ ID NO: 31865 - DNA, 21 bp, Artificial Sequence
  Description of Artificial Sequence: Synthetic oligonucleotide
ggatacctcccagtcgaccac

SEQ ID NO: 31866 - DNA, 21 bp, Artificial Sequence
  Description of Artificial Sequence: Synthetic oligonucleotide
ggatacctcagcgaaacacac

SEQ ID NO: 31867 - DNA, 21 bp, Artificial Sequence
  Description of Artificial Sequence: Synthetic oligonucleotide
ggatacctcagcaaaatgcca

SEQ ID NO: 31868 - DNA, 21 bp, Artificial Sequence
  Description of Artificial Sequence: Synthetic oligonucleotide
ggatacctcacagaaagactc

SEQ ID NO: 31869 - DNA, 21 bp, Artificial Sequence
  Description of Artificial Sequence: Synthetic oligonucleotide
ggatacatgatcaaaatgcca

SEQ ID NO: 31870 - DNA, 21 bp, Artificial Sequence
  Description of Artificial Sequence: Synthetic oligonucleotide
ggatacccaagccacgcagca

SEQ ID NO: 31871 - DNA, 21 bp, Artificial Sequence
  Description of Artificial Sequence: Synthetic oligonucleotide
ggatacccaagcaaaggacca

SEQ ID NO: 31872 - DNA, 21 bp, Artificial Sequence
  Description of Artificial Sequence: Synthetic oligonucleotide
ggatacccaacagcaagcgca

SEQ ID NO: 31873 - DNA, 21 bp, Artificial Sequence
  Description of Artificial Sequence: Synthetic oligonucleotide
ggatacccagtcggaccagca

SEQ ID NO: 31874 - DNA, 21 bp, Artificial Sequence
  Description of Artificial Sequence: Synthetic oligonucleotide
ggataccaaagcagatgcgca

SEQ ID NO: 31875 - DNA, 21 bp, Artificial Sequence
  Description of Artificial Sequence: Synthetic oligonucleotide
ggatacagagcaacagaaaca

SEQ ID NO: 31876 - DNA, 21 bp, Artificial Sequence
  Description of Artificial Sequence: Synthetic oligonucleotide
ggatacagactcatgccagaa

SEQ ID NO: 31877 - DNA, 21 bp, Artificial Sequence
  Description of Artificial Sequence: Synthetic oligonucleotide
ggatacagaagcaacgaaaca

SEQ ID NO: 31878 - DNA, 21 bp, Artificial Sequence
  Description of Artificial Sequence: Synthetic oligonucleotide
ggatacagcctcccagtcaca

SEQ ID NO: 31879 - DNA, 21 bp, Artificial Sequence
  Description of Artificial Sequence: Synthetic oligonucleotide
ggatacagcaacaacaaacca

SEQ ID NO: 31880 - DNA, 21 bp, Artificial Sequence
  Description of Artificial Sequence: Synthetic oligonucleotide
ggatacacaagcggacaacca

SEQ ID NO: 31881 - DNA, 21 bp, Artificial Sequence
  Description of Artificial Sequence: Synthetic oligonucleotide
ggatacgtcccagtcagccaa

SEQ ID NO: 31882 - DNA, 21 bp, Artificial Sequence
  Description of Artificial Sequence: Synthetic oligonucleotide
ggatactgggcaagcagcaac

SEQ ID NO: 31883 - DNA, 21 bp, Artificial Sequence
  Description of Artificial Sequence: Synthetic oligonucleotide
cacgcagcagcacaaccaagc

SEQ ID NO: 31884 - DNA, 21 bp, Artificial Sequence
  Description of Artificial Sequence: Synthetic oligonucleotide
cacgcagcacaccaaagcctc

SEQ ID NO: 31885 - DNA, 21 bp, Artificial Sequence
  Description of Artificial Sequence: Synthetic oligonucleotide
cacgcagcaagcccaatggtc

SEQ ID NO: 31886 - DNA, 21 bp, Artificial Sequence
  Description of Artificial Sequence: Synthetic oligonucleotide
cacgcagcaagcagcgtccca

SEQ ID NO: 31887 - DNA, 21 bp, Artificial Sequence
  Description of Artificial Sequence: Synthetic oligonucleotide
cacgcagaaagcgcacaccca

SEQ ID NO: 31888 - DNA, 21 bp, Artificial Sequence
  Description of Artificial Sequence: Synthetic oligonucleotide
cacgcaggaacagtcaaaatg

SEQ ID NO: 31889 - DNA, 21 bp, Artificial Sequence
  Description of Artificial Sequence: Synthetic oligonucleotide
cacgcacacctcacaccaagc

SEQ ID NO: 31890 - DNA, 21 bp, Artificial Sequence
  Description of Artificial Sequence: Synthetic oligonucleotide
cacgcaatcccaacactcctc

SEQ ID NO: 31891 - DNA, 21 bp, Artificial Sequence
  Description of Artificial Sequence: Synthetic oligonucleotide
cacgcaaaaagcagaaacgaa

SEQ ID NO: 31892 - DNA, 21 bp, Artificial Sequence
  Description of Artificial Sequence: Synthetic oligonucleotide
cacgcaaaaagcgtcagcgca

SEQ ID NO: 31893 - DNA, 21 bp, Artificial Sequence
  Description of Artificial Sequence: Synthetic oligonucleotide
cacgcaaaaacagcactcaca

SEQ ID NO: 31894 - DNA, 21 bp, Artificial Sequence
  Description of Artificial Sequence: Synthetic oligonucleotide
cacgcaaaagtcatgagagac

SEQ ID NO: 31895 - DNA, 21 bp, Artificial Sequence
  Description of Artificial Sequence: Synthetic oligonucleotide
cacgcactcgaacacttccca

SEQ ID NO: 31896 - DNA, 21 bp, Artificial Sequence
  Description of Artificial Sequence: Synthetic oligonucleotide
cacgcactcagaaacacaatg

SEQ ID NO: 31897 - DNA, 21 bp, Artificial Sequence
  Description of Artificial Sequence: Synthetic oligonucleotide
cacgcactcagcgacagccca

SEQ ID NO: 31898 - DNA, 21 bp, Artificial Sequence
  Description of Artificial Sequence: Synthetic oligonucleotide
cacgcaatgagcagcaacgtc

SEQ ID NO: 31899 - DNA, 21 bp, Artificial Sequence
  Description of Artificial Sequence: Synthetic oligonucleotide
cacgcaaacaaacacacacaa

SEQ ID NO: 31900 - DNA, 21 bp, Artificial Sequence
  Description of Artificial Sequence: Synthetic oligonucleotide
cacgcaaacaacgacccacac

SEQ ID NO: 31901 - DNA, 21 bp, Artificial Sequence
  Description of Artificial Sequence: Synthetic oligonucleotide
cacgcaaacccactcaacgga

SEQ ID NO: 31902 - DNA, 21 bp, Artificial Sequence
  Description of Artificial Sequence: Synthetic oligonucleotide
cacgcaaacccagtcgtcgga

SEQ ID NO: 31903 - DNA, 21 bp, Artificial Sequence
  Description of Artificial Sequence: Synthetic oligonucleotide
cacgcaaacagcacaacaaga

SEQ ID NO: 31904 - DNA, 21 bp, Artificial Sequence
  Description of Artificial Sequence: Synthetic oligonucleotide
cacgcaaacacaacaaacaca

SEQ ID NO: 31905 - DNA, 21 bp, Artificial Sequence
  Description of Artificial Sequence: Synthetic oligonucleotide
cacgcaccaccaaactacgca

SEQ ID NO: 31906 - DNA, 21 bp, Artificial Sequence
  Description of Artificial Sequence: Synthetic oligonucleotide
cacgcacaactcagcggaaca

SEQ ID NO: 31907 - DNA, 21 bp, Artificial Sequence
  Description of Artificial Sequence: Synthetic oligonucleotide
cacgcacaacaaggaggactc

SEQ ID NO: 31908 - DNA, 21 bp, Artificial Sequence
  Description of Artificial Sequence: Synthetic oligonucleotide
cacgcacaagtcgaaacactc

SEQ ID NO: 31909 - DNA, 21 bp, Artificial Sequence
  Description of Artificial Sequence: Synthetic oligonucleotide
cacgcaagagacagcagccca

SEQ ID NO: 31910 - DNA, 21 bp, Artificial Sequence
  Description of Artificial Sequence: Synthetic oligonucleotide
cacgcaagagacacattccca

SEQ ID NO: 31911 - DNA, 21 bp, Artificial Sequence
  Description of Artificial Sequence: Synthetic oligonucleotide
cacgcaagaatcgacagcagc

SEQ ID NO: 31912 - DNA, 21 bp, Artificial Sequence
  Description of Artificial Sequence: Synthetic oligonucleotide
cacgcaagaccaggaggactc

SEQ ID NO: 31913 - DNA, 21 bp, Artificial Sequence
  Description of Artificial Sequence: Synthetic oligonucleotide
cacgcaagagtcgaagcaaca

SEQ ID NO: 31914 - DNA, 21 bp, Artificial Sequence
  Description of Artificial Sequence: Synthetic oligonucleotide
cacgcaagcggaccagaccac

SEQ ID NO: 31915 - DNA, 21 bp, Artificial Sequence
  Description of Artificial Sequence: Synthetic oligonucleotide
cacgcaagcctcagcctcagc

SEQ ID NO: 31916 - DNA, 21 bp, Artificial Sequence
  Description of Artificial Sequence: Synthetic oligonucleotide
cacgcaagcaacagccaacac

SEQ ID NO: 31917 - DNA, 21 bp, Artificial Sequence
  Description of Artificial Sequence: Synthetic oligonucleotide
cacgcaagcccaggacaaaca

SEQ ID NO: 31918 - DNA, 21 bp, Artificial Sequence
  Description of Artificial Sequence: Synthetic oligonucleotide
cacgcaagcagaatcggagtc

SEQ ID NO: 31919 - DNA, 21 bp, Artificial Sequence
  Description of Artificial Sequence: Synthetic oligonucleotide
cacgcaagcagcaaaccagac

SEQ ID NO: 31920 - DNA, 21 bp, Artificial Sequence
  Description of Artificial Sequence: Synthetic oligonucleotide
cacgcaagcagcacaagacaa

SEQ ID NO: 31921 - DNA, 21 bp, Artificial Sequence
  Description of Artificial Sequence: Synthetic oligonucleotide
cacgcaagcacagtcagaaca

SEQ ID NO: 31922 - DNA, 21 bp, Artificial Sequence
  Description of Artificial Sequence: Synthetic oligonucleotide
cacgcaacagaccaaccacac

SEQ ID NO: 31923 - DNA, 21 bp, Artificial Sequence
  Description of Artificial Sequence: Synthetic oligonucleotide
cacgcaacagaaatggtcaga

SEQ ID NO: 31924 - DNA, 21 bp, Artificial Sequence
  Description of Artificial Sequence: Synthetic oligonucleotide
cacgcaacaatcagaacacac

SEQ ID NO: 31925 - DNA, 21 bp, Artificial Sequence
  Description of Artificial Sequence: Synthetic oligonucleotide
cacgcaacaagcaaactcaca

SEQ ID NO: 31926 - DNA, 21 bp, Artificial Sequence
  Description of Artificial Sequence: Synthetic oligonucleotide
cacgcagtcgaccacaaaagc

SEQ ID NO: 31927 - DNA, 21 bp, Artificial Sequence
  Description of Artificial Sequence: Synthetic oligonucleotide
cacgcagtcgaactcgcagac

SEQ ID NO: 31928 - DNA, 21 bp, Artificial Sequence
  Description of Artificial Sequence: Synthetic oligonucleotide
cacgcatacacactcgacgga

SEQ ID NO: 31929 - DNA, 21 bp, Artificial Sequence
  Description of Artificial Sequence: Synthetic oligonucleotide
cacgacgcaagcgtccacaga

SEQ ID NO: 31930 - DNA, 21 bp, Artificial Sequence
  Description of Artificial Sequence: Synthetic oligonucleotide
cacgacgacgcatggacagca

SEQ ID NO: 31931 - DNA, 21 bp, Artificial Sequence
  Description of Artificial Sequence: Synthetic oligonucleotide
cacgacggaagagtcaacctc

SEQ ID NO: 31932 - DNA, 21 bp, Artificial Sequence
  Description of Artificial Sequence: Synthetic oligonucleotide
cacgacggaagcagaagcaca

SEQ ID NO: 31933 - DNA, 21 bp, Artificial Sequence
  Description of Artificial Sequence: Synthetic oligonucleotide
cacgaccacctcggaacacca

SEQ ID NO: 31934 - DNA, 21 bp, Artificial Sequence
  Description of Artificial Sequence: Synthetic oligonucleotide
cacgacatcgcaaaaacaaac

SEQ ID NO: 31935 - DNA, 21 bp, Artificial Sequence
  Description of Artificial Sequence: Synthetic oligonucleotide
cacgacatcgaattcaacaca

SEQ ID NO: 31936 - DNA, 21 bp, Artificial Sequence
  Description of Artificial Sequence: Synthetic oligonucleotide
cacgacctcgcatacagacca

SEQ ID NO: 31937 - DNA, 21 bp, Artificial Sequence
  Description of Artificial Sequence: Synthetic oligonucleotide
cacgacctcaacccagaaaac

SEQ ID NO: 31938 - DNA, 21 bp, Artificial Sequence
  Description of Artificial Sequence: Synthetic oligonucleotide
cacgacaacagaatcaacgac

SEQ ID NO: 31939 - DNA, 21 bp, Artificial Sequence
  Description of Artificial Sequence: Synthetic oligonucleotide
cacgacccacacgcagtcaca

SEQ ID NO: 31940 - DNA, 21 bp, Artificial Sequence
  Description of Artificial Sequence: Synthetic oligonucleotide
cacgacccaatcagactcgga

SEQ ID NO: 31941 - DNA, 21 bp, Artificial Sequence
  Description of Artificial Sequence: Synthetic oligonucleotide
cacgacccaatgatgctcctc

SEQ ID NO: 31942 - DNA, 21 bp, Artificial Sequence
  Description of Artificial Sequence: Synthetic oligonucleotide
cacgacccaagcgacggagca

SEQ ID NO: 31943 - DNA, 21 bp, Artificial Sequence
  Description of Artificial Sequence: Synthetic oligonucleotide
cacgacagaatcgcaggactc

SEQ ID NO: 31944 - DNA, 21 bp, Artificial Sequence
  Description of Artificial Sequence: Synthetic oligonucleotide
cacgacagagtcagcagcgga

SEQ ID NO: 31945 - DNA, 21 bp, Artificial Sequence
  Description of Artificial Sequence: Synthetic oligonucleotide
cacgacagcgcaagacaccca

SEQ ID NO: 31946 - DNA, 21 bp, Artificial Sequence
  Description of Artificial Sequence: Synthetic oligonucleotide
cacgacagcctcagcgaaaaa

SEQ ID NO: 31947 - DNA, 21 bp, Artificial Sequence
  Description of Artificial Sequence: Synthetic oligonucleotide
cacgacagcagattcgcaaac

SEQ ID NO: 31948 - DNA, 21 bp, Artificial Sequence
  Description of Artificial Sequence: Synthetic oligonucleotide
cacgacagcacactcggaagc

SEQ ID NO: 31949 - DNA, 21 bp, Artificial Sequence
  Description of Artificial Sequence: Synthetic oligonucleotide
cacgacacaatccacggaatc

SEQ ID NO: 31950 - DNA, 21 bp, Artificial Sequence
  Description of Artificial Sequence: Synthetic oligonucleotide
cacgacgtcccaaaaaaccca

SEQ ID NO: 31951 - DNA, 21 bp, Artificial Sequence
  Description of Artificial Sequence: Synthetic oligonucleotide
cacgactacccaagacaactc

SEQ ID NO: 31952 - DNA, 21 bp, Artificial Sequence
  Description of Artificial Sequence: Synthetic oligonucleotide
cacgaagcactcctcccaaac

SEQ ID NO: 31953 - DNA, 21 bp, Artificial Sequence
  Description of Artificial Sequence: Synthetic oligonucleotide
cacgaagcactcacaggactc

SEQ ID NO: 31954 - DNA, 21 bp, Artificial Sequence
  Description of Artificial Sequence: Synthetic oligonucleotide
cacgaagacggaagcgcaatg

SEQ ID NO: 31955 - DNA, 21 bp, Artificial Sequence
  Description of Artificial Sequence: Synthetic oligonucleotide
cacgaattcggagtcgcattc

SEQ ID NO: 31956 - DNA, 21 bp, Artificial Sequence
  Description of Artificial Sequence: Synthetic oligonucleotide
cacgaaggaggacacccatac

SEQ ID NO: 31957 - DNA, 21 bp, Artificial Sequence
  Description of Artificial Sequence: Synthetic oligonucleotide
cacgaaggacacagaggagtc

SEQ ID NO: 31958 - DNA, 21 bp, Artificial Sequence
  Description of Artificial Sequence: Synthetic oligonucleotide
cacgaaaaagtcagagtccac

SEQ ID NO: 31959 - DNA, 21 bp, Artificial Sequence
  Description of Artificial Sequence: Synthetic oligonucleotide
cacgaacaagcaagaagcatc

SEQ ID NO: 31960 - DNA, 21 bp, Artificial Sequence
  Description of Artificial Sequence: Synthetic oligonucleotide
cacgaacaatgcgaagcatac

SEQ ID NO: 31961 - DNA, 21 bp, Artificial Sequence
  Description of Artificial Sequence: Synthetic oligonucleotide
cacgaacaagtcgaaagacca

SEQ ID NO: 31962 - DNA, 21 bp, Artificial Sequence
  Description of Artificial Sequence: Synthetic oligonucleotide
cacgaaagcgaccaattccca

SEQ ID NO: 31963 - DNA, 21 bp, Artificial Sequence
  Description of Artificial Sequence: Synthetic oligonucleotide
cacgaaacaagagtcatgagc

SEQ ID NO: 31964 - DNA, 21 bp, Artificial Sequence
  Description of Artificial Sequence: Synthetic oligonucleotide
cacgaagtcggattcatggga

SEQ ID NO: 31965 - DNA, 21 bp, Artificial Sequence
  Description of Artificial Sequence: Synthetic oligonucleotide
cacgaagtcaaccacaacaca

SEQ ID NO: 31966 - DNA, 21 bp, Artificial Sequence
  Description of Artificial Sequence: Synthetic oligonucleotide
cacgaagtcagattcagccaa

SEQ ID NO: 31967 - DNA, 21 bp, Artificial Sequence
  Description of Artificial Sequence: Synthetic oligonucleotide
cacgaagtcagcgtcaaatgc

SEQ ID NO: 31968 - DNA, 21 bp, Artificial Sequence
  Description of Artificial Sequence: Synthetic oligonucleotide
cacgaagtctacagaaacatg

SEQ ID NO: 31969 - DNA, 21 bp, Artificial Sequence
  Description of Artificial Sequence: Synthetic oligonucleotide
cacttcgcacaagcaccaagc

SEQ ID NO: 31970 - DNA, 21 bp, Artificial Sequence
  Description of Artificial Sequence: Synthetic oligonucleotide
cacttcggaagcagcatccca

SEQ ID NO: 31971 - DNA, 21 bp, Artificial Sequence
  Description of Artificial Sequence: Synthetic oligonucleotide
cacttcggaacaaacggagac

SEQ ID NO: 31972 - DNA, 21 bp, Artificial Sequence
  Description of Artificial Sequence: Synthetic oligonucleotide
cacttcaacgacgcaacagtc

SEQ ID NO: 31973 - DNA, 21 bp, Artificial Sequence
  Description of Artificial Sequence: Synthetic oligonucleotide
cacttcaacagcagcagcaga

SEQ ID NO: 31974 - DNA, 21 bp, Artificial Sequence
  Description of Artificial Sequence: Synthetic oligonucleotide
cacttcagaggagcaatgctc

SEQ ID NO: 31975 - DNA, 21 bp, Artificial Sequence
  Description of Artificial Sequence: Synthetic oligonucleotide
cacttcagccacgaaagaagc

SEQ ID NO: 31976 - DNA, 21 bp, Artificial Sequence
  Description of Artificial Sequence: Synthetic oligonucleotide
cacttcagcccaaaaggaaca

SEQ ID NO: 31977 - DNA, 21 bp, Artificial Sequence
  Description of Artificial Sequence: Synthetic oligonucleotide
cacttcagcagcacaacaatc

SEQ ID NO: 31978 - DNA, 21 bp, Artificial Sequence
  Description of Artificial Sequence: Synthetic oligonucleotide
cacttcacaagcagagaactc

SEQ ID NO: 31979 - DNA, 21 bp, Artificial Sequence
  Description of Artificial Sequence: Synthetic oligonucleotide
cacttcacaagcacaccaagc

SEQ ID NO: 31980 - DNA, 21 bp, Artificial Sequence
  Description of Artificial Sequence: Synthetic oligonucleotide
cacttcgtcccaagcagcgca

SEQ ID NO: 31981 - DNA, 21 bp, Artificial Sequence
  Description of Artificial Sequence: Synthetic oligonucleotide
cacggagcagcagcactcgtc

SEQ ID NO: 31982 - DNA, 21 bp, Artificial Sequence
  Description of Artificial Sequence: Synthetic oligonucleotide
cacggagcaaaactcctcagc

SEQ ID NO: 31983 - DNA, 21 bp, Artificial Sequence
  Description of Artificial Sequence: Synthetic oligonucleotide
cacggagcactcagcgaagca

SEQ ID NO: 31984 - DNA, 21 bp, Artificial Sequence
  Description of Artificial Sequence: Synthetic oligonucleotide
cacggagcaaacagactcaca

SEQ ID NO: 31985 - DNA, 21 bp, Artificial Sequence
  Description of Artificial Sequence: Synthetic oligonucleotide
cacggagacggacacagcaca

SEQ ID NO: 31986 - DNA, 21 bp, Artificial Sequence
  Description of Artificial Sequence: Synthetic oligonucleotide
cacggagacagagcactcatg

SEQ ID NO: 31987 - DNA, 21 bp, Artificial Sequence
  Description of Artificial Sequence: Synthetic oligonucleotide
cacggagacgtcaacagaaca

SEQ ID NO: 31988 - DNA, 21 bp, Artificial Sequence
  Description of Artificial Sequence: Synthetic oligonucleotide
cacggagaaatgatggaaagc

SEQ ID NO: 31989 - DNA, 21 bp, Artificial Sequence
  Description of Artificial Sequence: Synthetic oligonucleotide
cacggattccacacaggaagc

SEQ ID NO: 31990 - DNA, 21 bp, Artificial Sequence
  Description of Artificial Sequence: Synthetic oligonucleotide
cacggattccaaaacgtcgac

SEQ ID NO: 31991 - DNA, 21 bp, Artificial Sequence
  Description of Artificial Sequence: Synthetic oligonucleotide
cacggaggagaagtcacattc

SEQ ID NO: 31992 - DNA, 21 bp, Artificial Sequence
  Description of Artificial Sequence: Synthetic oligonucleotide
cacggaggattcagaggagaa

SEQ ID NO: 31993 - DNA, 21 bp, Artificial Sequence
  Description of Artificial Sequence: Synthetic oligonucleotide
cacggacacttcagcatggca

SEQ ID NO: 31994 - DNA, 21 bp, Artificial Sequence
  Description of Artificial Sequence: Synthetic oligonucleotide
cacggaaaacacgtcttcgtc

SEQ ID NO: 31995 - DNA, 21 bp, Artificial Sequence
  Description of Artificial Sequence: Synthetic oligonucleotide
cacggactcatcgcagtcgca

SEQ ID NO: 31996 - DNA, 21 bp, Artificial Sequence
  Description of Artificial Sequence: Synthetic oligonucleotide
cacggactcaacagcatgcca

SEQ ID NO: 31997 - DNA, 21 bp, Artificial Sequence
  Description of Artificial Sequence: Synthetic oligonucleotide
cacggactcagcgaagactac

SEQ ID NO: 31998 - DNA, 21 bp, Artificial Sequence
  Description of Artificial Sequence: Synthetic oligonucleotide
cacggactcagcctcaaagac

SEQ ID NO: 31999 - DNA, 21 bp, Artificial Sequence
  Description of Artificial Sequence: Synthetic oligonucleotide
cacggaatggaagacggactc

SEQ ID NO: 32000 - DNA, 21 bp, Artificial Sequence
  Description of Artificial Sequence: Synthetic oligonucleotide
cacggaaacctcaactaccac

SEQ ID NO: 32001 - DNA, 21 bp, Artificial Sequence
  Description of Artificial Sequence: Synthetic oligonucleotide
cacggaccaaacgcaagcgac

SEQ ID NO: 32002 - DNA, 21 bp, Artificial Sequence
  Description of Artificial Sequence: Synthetic oligonucleotide
cacggaagagaagtccaccaa

SEQ ID NO: 32003 - DNA, 21 bp, Artificial Sequence
  Description of Artificial Sequence: Synthetic oligonucleotide
cacggaagcggaagctgctgc

SEQ ID NO: 32004 - DNA, 21 bp, Artificial Sequence
  Description of Artificial Sequence: Synthetic oligonucleotide
cacggaagcatcgaaagccaa

SEQ ID NO: 32005 - DNA, 21 bp, Artificial Sequence
  Description of Artificial Sequence: Synthetic oligonucleotide
cacggaagcaaaacaatgagc

SEQ ID NO: 32006 - DNA, 21 bp, Artificial Sequence
  Description of Artificial Sequence: Synthetic oligonucleotide
cacggaagcatgtggccagaa

SEQ ID NO: 32007 - DNA, 21 bp, Artificial Sequence
  Description of Artificial Sequence: Synthetic oligonucleotide
cacggaagcagcacaagaaac

SEQ ID NO: 32008 - DNA, 21 bp, Artificial Sequence
  Description of Artificial Sequence: Synthetic oligonucleotide
cacggaagcacagaaaacagc

SEQ ID NO: 32009 - DNA, 21 bp, Artificial Sequence
  Description of Artificial Sequence: Synthetic oligonucleotide
cacggaagcacaaaactccca

SEQ ID NO: 32010 - DNA, 21 bp, Artificial Sequence
  Description of Artificial Sequence: Synthetic oligonucleotide
cacggaacaggagtcttcgga

SEQ ID NO: 32011 - DNA, 21 bp, Artificial Sequence
  Description of Artificial Sequence: Synthetic oligonucleotide
cacggaacaaacagaacacac

SEQ ID NO: 32012 - DNA, 21 bp, Artificial Sequence
  Description of Artificial Sequence: Synthetic oligonucleotide
cacggaacaagcaaacacagc

SEQ ID NO: 32013 - DNA, 21 bp, Artificial Sequence
  Description of Artificial Sequence: Synthetic oligonucleotide
cacggaacaagcagcagacca

SEQ ID NO: 32014 - DNA, 21 bp, Artificial Sequence
  Description of Artificial Sequence: Synthetic oligonucleotide
cacggagtccaccaccaagtc

SEQ ID NO: 32015 - DNA, 21 bp, Artificial Sequence
  Description of Artificial Sequence: Synthetic oligonucleotide
cacggagtctacccacacctc

SEQ ID NO: 32016 - DNA, 21 bp, Artificial Sequence
  Description of Artificial Sequence: Synthetic oligonucleotide
caccacgcagcaggagcagtc

SEQ ID NO: 32017 - DNA, 21 bp, Artificial Sequence
  Description of Artificial Sequence: Synthetic oligonucleotide
caccacgcaaaagcaaacctc

SEQ ID NO: 32018 - DNA, 21 bp, Artificial Sequence
  Description of Artificial Sequence: Synthetic oligonucleotide
caccacgcactcccaccagac

SEQ ID NO: 32019 - DNA, 21 bp, Artificial Sequence
  Description of Artificial Sequence: Synthetic oligonucleotide
caccacgcaccaaacacacca

SEQ ID NO: 32020 - DNA, 21 bp, Artificial Sequence
  Description of Artificial Sequence: Synthetic oligonucleotide
caccacgcacaaggagaagca

SEQ ID NO: 32021 - DNA, 21 bp, Artificial Sequence
  Description of Artificial Sequence: Synthetic oligonucleotide
caccacgacgacagactccaa

SEQ ID NO: 32022 - DNA, 21 bp, Artificial Sequence
  Description of Artificial Sequence: Synthetic oligonucleotide
caccacgacctcagcatccca

SEQ ID NO: 32023 - DNA, 21 bp, Artificial Sequence
  Description of Artificial Sequence: Synthetic oligonucleotide
caccacgacccaacaacaaga

SEQ ID NO: 32024 - DNA, 21 bp, Artificial Sequence
  Description of Artificial Sequence: Synthetic oligonucleotide
caccacggaacagacagacca

SEQ ID NO: 32025 - DNA, 21 bp, Artificial Sequence
  Description of Artificial Sequence: Synthetic oligonucleotide
caccacctcgcattcctcgac

SEQ ID NO: 32026 - DNA, 21 bp, Artificial Sequence
  Description of Artificial Sequence: Synthetic oligonucleotide
caccacatgagcacagcaagc

SEQ ID NO: 32027 - DNA, 21 bp, Artificial Sequence
  Description of Artificial Sequence: Synthetic oligonucleotide
caccacaacgtcaacagcctc

SEQ ID NO: 32028 - DNA, 21 bp, Artificial Sequence
  Description of Artificial Sequence: Synthetic oligonucleotide
caccacccaagactcgacaca

SEQ ID NO: 32029 - DNA, 21 bp, Artificial Sequence
  Description of Artificial Sequence: Synthetic oligonucleotide
caccacagagtcgaaacagga

SEQ ID NO: 32030 - DNA, 21 bp, Artificial Sequence
  Description of Artificial Sequence: Synthetic oligonucleotide
caccacagcccagcaatcaca

SEQ ID NO: 32031 - DNA, 21 bp, Artificial Sequence
  Description of Artificial Sequence: Synthetic oligonucleotide
caccacacaaacccagaccca

SEQ ID NO: 32032 - DNA, 21 bp, Artificial Sequence
  Description of Artificial Sequence: Synthetic oligonucleotide
cacatcgcactcacaagccca

SEQ ID NO: 32033 - DNA, 21 bp, Artificial Sequence
  Description of Artificial Sequence: Synthetic oligonucleotide
cacatcctcacaagcgcacca

SEQ ID NO: 32034 - DNA, 21 bp, Artificial Sequence
  Description of Artificial Sequence: Synthetic oligonucleotide
cacatcccactcaaacaagca

SEQ ID NO: 32035 - DNA, 21 bp, Artificial Sequence
  Description of Artificial Sequence: Synthetic oligonucleotide
cacatcccaagcagcagcgga

SEQ ID NO: 32036 - DNA, 21 bp, Artificial Sequence
  Description of Artificial Sequence: Synthetic oligonucleotide
cacatcccagtcatgacacca

SEQ ID NO: 32037 - DNA, 21 bp, Artificial Sequence
  Description of Artificial Sequence: Synthetic oligonucleotide
cacatcagacacgacccaaaa

SEQ ID NO: 32038 - DNA, 21 bp, Artificial Sequence
  Description of Artificial Sequence: Synthetic oligonucleotide
cacatcagaacaggaatgcca

SEQ ID NO: 32039 - DNA, 21 bp, Artificial Sequence
  Description of Artificial Sequence: Synthetic oligonucleotide
cacatcagcccaatgccagtc

SEQ ID NO: 32040 - DNA, 21 bp, Artificial Sequence
  Description of Artificial Sequence: Synthetic oligonucleotide
cacatcagcagcagcacagtc

SEQ ID NO: 32041 - DNA, 21 bp, Artificial Sequence
  Description of Artificial Sequence: Synthetic oligonucleotide
cacatcacacaacaactcaca

SEQ ID NO: 32042 - DNA, 21 bp, Artificial Sequence
  Description of Artificial Sequence: Synthetic oligonucleotide
cacaaagcagacagcgtcagc

SEQ ID NO: 32043 - DNA, 21 bp, Artificial Sequence
  Description of Artificial Sequence: Synthetic oligonucleotide
cacaaattcagcagcccactc

SEQ ID NO: 32044 - DNA, 21 bp, Artificial Sequence
  Description of Artificial Sequence: Synthetic oligonucleotide
cacaaaggactcagcccactc

SEQ ID NO: 32045 - DNA, 21 bp, Artificial Sequence
  Description of Artificial Sequence: Synthetic oligonucleotide
cacaaactcggaggaagcttc

SEQ ID NO: 32046 - DNA, 21 bp, Artificial Sequence
  Description of Artificial Sequence: Synthetic oligonucleotide
cacaaactcccaggacaccac

SEQ ID NO: 32047 - DNA, 21 bp, Artificial Sequence
  Description of Artificial Sequence: Synthetic oligonucleotide
cacaaactcacaagcaacgga

SEQ ID NO: 32048 - DNA, 21 bp, Artificial Sequence
  Description of Artificial Sequence: Synthetic oligonucleotide
cacaaaaacatcggagtcgtc

SEQ ID NO: 32049 - DNA, 21 bp, Artificial Sequence
  Description of Artificial Sequence: Synthetic oligonucleotide
cacaaaccaccaatcgtccca

SEQ ID NO: 32050 - DNA, 21 bp, Artificial Sequence
  Description of Artificial Sequence: Synthetic oligonucleotide
cacaaaccacaagtcggagtc

SEQ ID NO: 32051 - DNA, 21 bp, Artificial Sequence
  Description of Artificial Sequence: Synthetic oligonucleotide
cacaaaccaagaccagaagtc

SEQ ID NO: 32052 - DNA, 21 bp, Artificial Sequence
  Description of Artificial Sequence: Synthetic oligonucleotide
cacaaacaaagccaagcagga

SEQ ID NO: 32053 - DNA, 21 bp, Artificial Sequence
  Description of Artificial Sequence: Synthetic oligonucleotide
cacaaacaaacaatggaaaga

SEQ ID NO: 32054 - DNA, 21 bp, Artificial Sequence
  Description of Artificial Sequence: Synthetic oligonucleotide
cacaaaagcagcgacagactc

SEQ ID NO: 32055 - DNA, 21 bp, Artificial Sequence
  Description of Artificial Sequence: Synthetic oligonucleotide
cacaaaagcgtcctcgtccca

SEQ ID NO: 32056 - DNA, 21 bp, Artificial Sequence
  Description of Artificial Sequence: Synthetic oligonucleotide
cacaaaacaagcgtcccaatc

SEQ ID NO: 32057 - DNA, 21 bp, Artificial Sequence
  Description of Artificial Sequence: Synthetic oligonucleotide
cacaaagtcccagcacaaaac

SEQ ID NO: 32058 - DNA, 21 bp, Artificial Sequence
  Description of Artificial Sequence: Synthetic oligonucleotide
cacaaagtcccaggactcgga

SEQ ID NO: 32059 - DNA, 21 bp, Artificial Sequence
  Description of Artificial Sequence: Synthetic oligonucleotide
cacaaatacaacctcggagca

SEQ ID NO: 32060 - DNA, 21 bp, Artificial Sequence
  Description of Artificial Sequence: Synthetic oligonucleotide
cacctcgcagcactcagccac

SEQ ID NO: 32061 - DNA, 21 bp, Artificial Sequence
  Description of Artificial Sequence: Synthetic oligonucleotide
cacctcgcagaagtcagagaa

SEQ ID NO: 32062 - DNA, 21 bp, Artificial Sequence
  Description of Artificial Sequence: Synthetic oligonucleotide
cacctcgcaggaacaggagca

SEQ ID NO: 32063 - DNA, 21 bp, Artificial Sequence
  Description of Artificial Sequence: Synthetic oligonucleotide
cacctcgcactcgcaccaagc

SEQ ID NO: 32064 - DNA, 21 bp, Artificial Sequence
  Description of Artificial Sequence: Synthetic oligonucleotide
cacctcgcaccagcaatcaac

SEQ ID NO: 32065 - DNA, 21 bp, Artificial Sequence
  Description of Artificial Sequence: Synthetic oligonucleotide
cacctcgaactcggaacaaga

SEQ ID NO: 32066 - DNA, 21 bp, Artificial Sequence
  Description of Artificial Sequence: Synthetic oligonucleotide
cacctcgaaagaccactcagc

SEQ ID NO: 32067 - DNA, 21 bp, Artificial Sequence
  Description of Artificial Sequence: Synthetic oligonucleotide
cacctcggaccagacgcaatc

SEQ ID NO: 32068 - DNA, 21 bp, Artificial Sequence
  Description of Artificial Sequence: Synthetic oligonucleotide
cacctcggaagcagcaactgg

SEQ ID NO: 32069 - DNA, 21 bp, Artificial Sequence
  Description of Artificial Sequence: Synthetic oligonucleotide
cacctccacagcgacagcgga

SEQ ID NO: 32070 - DNA, 21 bp, Artificial Sequence
  Description of Artificial Sequence: Synthetic oligonucleotide
cacctccacagccacgaaagc

SEQ ID NO: 32071 - DNA, 21 bp, Artificial Sequence
  Description of Artificial Sequence: Synthetic oligonucleotide
cacctccactacccagtcgca

SEQ ID NO: 32072 - DNA, 21 bp, Artificial Sequence
  Description of Artificial Sequence: Synthetic oligonucleotide
cacctcaacgcaaaattcgca

SEQ ID NO: 32073 - DNA, 21 bp, Artificial Sequence
  Description of Artificial Sequence: Synthetic oligonucleotide
cacctcaacgcaccagcaaca

SEQ ID NO: 32074 - DNA, 21 bp, Artificial Sequence
  Description of Artificial Sequence: Synthetic oligonucleotide
cacctcaacctcgaaggaaga

SEQ ID NO: 32075 - DNA, 21 bp, Artificial Sequence
  Description of Artificial Sequence: Synthetic oligonucleotide
cacctcccagcacacccactc

SEQ ID NO: 32076 - DNA, 21 bp, Artificial Sequence
  Description of Artificial Sequence: Synthetic oligonucleotide
cacctcccaaaaaacccaagc

SEQ ID NO: 32077 - DNA, 21 bp, Artificial Sequence
  Description of Artificial Sequence: Synthetic oligonucleotide
cacctcccaagcggactcaca

SEQ ID NO: 32078 - DNA, 21 bp, Artificial Sequence
  Description of Artificial Sequence: Synthetic oligonucleotide
cacctcccaacaagcgacgca

SEQ ID NO: 32079 - DNA, 21 bp, Artificial Sequence
  Description of Artificial Sequence: Synthetic oligonucleotide
cacctcccatacaacgtccca

SEQ ID NO: 32080 - DNA, 21 bp, Artificial Sequence
  Description of Artificial Sequence: Synthetic oligonucleotide
cacctccaaatcctcgaagca

SEQ ID NO: 32081 - DNA, 21 bp, Artificial Sequence
  Description of Artificial Sequence: Synthetic oligonucleotide
cacctcagagaactcatcagc

SEQ ID NO: 32082 - DNA, 21 bp, Artificial Sequence
  Description of Artificial Sequence: Synthetic oligonucleotide
cacctcagaagcggagtcgga

SEQ ID NO: 32083 - DNA, 21 bp, Artificial Sequence
  Description of Artificial Sequence: Synthetic oligonucleotide
cacctcagcgactggccaatc

SEQ ID NO: 32084 - DNA, 21 bp, Artificial Sequence
  Description of Artificial Sequence: Synthetic oligonucleotide
cacctcagcggaatgcacgca

SEQ ID NO: 32085 - DNA, 21 bp, Artificial Sequence
  Description of Artificial Sequence: Synthetic oligonucleotide
cacctcagcatcgcagcaagc

SEQ ID NO: 32086 - DNA, 21 bp, Artificial Sequence
  Description of Artificial Sequence: Synthetic oligonucleotide
cacctcagcccattcacagac

SEQ ID NO: 32087 - DNA, 21 bp, Artificial Sequence
  Description of Artificial Sequence: Synthetic oligonucleotide
cacctcagcccactcgtcaga

SEQ ID NO: 32088 - DNA, 21 bp, Artificial Sequence
  Description of Artificial Sequence: Synthetic oligonucleotide
cacctcagcccaagaccacca

SEQ ID NO: 32089 - DNA, 21 bp, Artificial Sequence
  Description of Artificial Sequence: Synthetic oligonucleotide
cacctcagcgtcagactcagc

SEQ ID NO: 32090 - DNA, 21 bp, Artificial Sequence
  Description of Artificial Sequence: Synthetic oligonucleotide
cacctcagcgtcagcggaagc

SEQ ID NO: 32091 - DNA, 21 bp, Artificial Sequence
  Description of Artificial Sequence: Synthetic oligonucleotide
cacctcacagcactcacagga

SEQ ID NO: 32092 - DNA, 21 bp, Artificial Sequence
  Description of Artificial Sequence: Synthetic oligonucleotide
cacctcacagacacaagaaga

SEQ ID NO: 32093 - DNA, 21 bp, Artificial Sequence
  Description of Artificial Sequence: Synthetic oligonucleotide
cacctcacaagcggagcagca

SEQ ID NO: 32094 - DNA, 21 bp, Artificial Sequence
  Description of Artificial Sequence: Synthetic oligonucleotide
cacctcacaagcaacagcctc

SEQ ID NO: 32095 - DNA, 21 bp, Artificial Sequence
  Description of Artificial Sequence: Synthetic oligonucleotide
cacctcacaagcagagcagga

SEQ ID NO: 32096 - DNA, 21 bp, Artificial Sequence
  Description of Artificial Sequence: Synthetic oligonucleotide
cacctcgtcagaggagaacca

SEQ ID NO: 32097 - DNA, 21 bp, Artificial Sequence
  Description of Artificial Sequence: Synthetic oligonucleotide
cacctcgtcagcaacagaagc

SEQ ID NO: 32098 - DNA, 21 bp, Artificial Sequence
  Description of Artificial Sequence: Synthetic oligonucleotide
cacctcgtcagcacaacaagc

SEQ ID NO: 32099 - DNA, 21 bp, Artificial Sequence
  Description of Artificial Sequence: Synthetic oligonucleotide
cacctcgtcagcacagtcgca

SEQ ID NO: 32100 - DNA, 21 bp, Artificial Sequence
  Description of Artificial Sequence: Synthetic oligonucleotide
cacatggcaggaggagactac

SEQ ID NO: 32101 - DNA, 21 bp, Artificial Sequence
  Description of Artificial Sequence: Synthetic oligonucleotide
cacatggacagcacaatcagc

SEQ ID NO: 32102 - DNA, 21 bp, Artificial Sequence
  Description of Artificial Sequence: Synthetic oligonucleotide
cacatgggagacatgaacaga

SEQ ID NO: 32103 - DNA, 21 bp, Artificial Sequence
  Description of Artificial Sequence: Synthetic oligonucleotide
cacatgatcatcgtcgacagc

SEQ ID NO: 32104 - DNA, 21 bp, Artificial Sequence
  Description of Artificial Sequence: Synthetic oligonucleotide
cacatgaaaccacaaagcgac

SEQ ID NO: 32105 - DNA, 21 bp, Artificial Sequence
  Description of Artificial Sequence: Synthetic oligonucleotide
cacatgctcacacacacacac

SEQ ID NO: 32106 - DNA, 21 bp, Artificial Sequence
  Description of Artificial Sequence: Synthetic oligonucleotide
cacatgatgaaactcggaagc

SEQ ID NO: 32107 - DNA, 21 bp, Artificial Sequence
  Description of Artificial Sequence: Synthetic oligonucleotide
cacatgatgagccacggacca

SEQ ID NO: 32108 - DNA, 21 bp, Artificial Sequence
  Description of Artificial Sequence: Synthetic oligonucleotide
cacatgaacgcagaccacaaa

SEQ ID NO: 32109 - DNA, 21 bp, Artificial Sequence
  Description of Artificial Sequence: Synthetic oligonucleotide
cacatgaacctcaaagacgca

SEQ ID NO: 32110 - DNA, 21 bp, Artificial Sequence
  Description of Artificial Sequence: Synthetic oligonucleotide
cacatgccagacgacccaagc

SEQ ID NO: 32111 - DNA, 21 bp, Artificial Sequence
  Description of Artificial Sequence: Synthetic oligonucleotide
cacatgccaaacatgtacagc

SEQ ID NO: 32112 - DNA, 21 bp, Artificial Sequence
  Description of Artificial Sequence: Synthetic oligonucleotide
cacatgagcaacccaagcttc

SEQ ID NO: 32113 - DNA, 21 bp, Artificial Sequence
  Description of Artificial Sequence: Synthetic oligonucleotide
cacatgagcgtcctccaaaaa

SEQ ID NO: 32114 - DNA, 21 bp, Artificial Sequence
  Description of Artificial Sequence: Synthetic oligonucleotide
cacatgagcgtcagagaccca

SEQ ID NO: 32115 - DNA, 21 bp, Artificial Sequence
  Description of Artificial Sequence: Synthetic oligonucleotide
cacatgacaggaacaaacctc

SEQ ID NO: 32116 - DNA, 21 bp, Artificial Sequence
  Description of Artificial Sequence: Synthetic oligonucleotide
cacatggtcgcaaacccagca

SEQ ID NO: 32117 - DNA, 21 bp, Artificial Sequence
  Description of Artificial Sequence: Synthetic oligonucleotide
cacaacgcagcacaaaaccaa

SEQ ID NO: 32118 - DNA, 21 bp, Artificial Sequence
  Description of Artificial Sequence: Synthetic oligonucleotide
cacaacgcaggatacatgcca

SEQ ID NO: 32119 - DNA, 21 bp, Artificial Sequence
  Description of Artificial Sequence: Synthetic oligonucleotide
cacaacgcaagcgcagtcaac

SEQ ID NO: 32120 - DNA, 21 bp, Artificial Sequence
  Description of Artificial Sequence: Synthetic oligonucleotide
cacaacgaactcccaccacca

SEQ ID NO: 32121 - DNA, 21 bp, Artificial Sequence
  Description of Artificial Sequence: Synthetic oligonucleotide
cacaacgaaccagacaaagga

SEQ ID NO: 32122 - DNA, 21 bp, Artificial Sequence
  Description of Artificial Sequence: Synthetic oligonucleotide
cacaaccacgacacagtcctc

SEQ ID NO: 32123 - DNA, 21 bp, Artificial Sequence
  Description of Artificial Sequence: Synthetic oligonucleotide
cacaaccacatcgtccacgca

SEQ ID NO: 32124 - DNA, 21 bp, Artificial Sequence
  Description of Artificial Sequence: Synthetic oligonucleotide
cacaacaaaagcagctacgtc

SEQ ID NO: 32125 - DNA, 21 bp, Artificial Sequence
  Description of Artificial Sequence: Synthetic oligonucleotide
cacaacatgagaatcccaagc

SEQ ID NO: 32126 - DNA, 21 bp, Artificial Sequence
  Description of Artificial Sequence: Synthetic oligonucleotide
cacaacaacacagtcaaccaa

SEQ ID NO: 32127 - DNA, 21 bp, Artificial Sequence
  Description of Artificial Sequence: Synthetic oligonucleotide
cacaacccaccaaaactcaca

SEQ ID NO: 32128 - DNA, 21 bp, Artificial Sequence
  Description of Artificial Sequence: Synthetic oligonucleotide
cacaacccaagagaactcgga

SEQ ID NO: 32129 - DNA, 21 bp, Artificial Sequence
  Description of Artificial Sequence: Synthetic oligonucleotide
cacaacccaagcctcagaaca

SEQ ID NO: 32130 - DNA, 21 bp, Artificial Sequence
  Description of Artificial Sequence: Synthetic oligonucleotide
cacaaccaaacactcggaagc

SEQ ID NO: 32131 - DNA, 21 bp, Artificial Sequence
  Description of Artificial Sequence: Synthetic oligonucleotide
cacaacagaaacgacggattc

SEQ ID NO: 32132 - DNA, 21 bp, Artificial Sequence
  Description of Artificial Sequence: Synthetic oligonucleotide
cacaacagccaccactacgca

SEQ ID NO: 32133 - DNA, 21 bp, Artificial Sequence
  Description of Artificial Sequence: Synthetic oligonucleotide
cacaacagccacagcatgaga

SEQ ID NO: 32134 - DNA, 21 bp, Artificial Sequence
  Description of Artificial Sequence: Synthetic oligonucleotide
cacaacagcccaggagtcgga

SEQ ID NO: 32135 - DNA, 21 bp, Artificial Sequence
  Description of Artificial Sequence: Synthetic oligonucleotide
cacaacagcagcttcgacatg

SEQ ID NO: 32136 - DNA, 21 bp, Artificial Sequence
  Description of Artificial Sequence: Synthetic oligonucleotide
cacccagcaatcctccaactc

SEQ ID NO: 32137 - DNA, 21 bp, Artificial Sequence
  Description of Artificial Sequence: Synthetic oligonucleotide
cacccagcaacaaaactcgga

SEQ ID NO: 32138 - DNA, 21 bp, Artificial Sequence
  Description of Artificial Sequence: Synthetic oligonucleotide
cacccagacccacacagcaca

SEQ ID NO: 32139 - DNA, 21 bp, Artificial Sequence
  Description of Artificial Sequence: Synthetic oligonucleotide
cacccagaaaaaagaaaccca

SEQ ID NO: 32140 - DNA, 21 bp, Artificial Sequence
  Description of Artificial Sequence: Synthetic oligonucleotide
cacccagaactcccactccac

SEQ ID NO: 32141 - DNA, 21 bp, Artificial Sequence
  Description of Artificial Sequence: Synthetic oligonucleotide
cacccagaaatgctcgtcaca

SEQ ID NO: 32142 - DNA, 21 bp, Artificial Sequence
  Description of Artificial Sequence: Synthetic oligonucleotide
cacccattcggaacagcaagc

SEQ ID NO: 32143 - DNA, 21 bp, Artificial Sequence
  Description of Artificial Sequence: Synthetic oligonucleotide
cacccaggattcaaccacgac

SEQ ID NO: 32144 - DNA, 21 bp, Artificial Sequence
  Description of Artificial Sequence: Synthetic oligonucleotide
cacccaggaccactcgtcgca

SEQ ID NO: 32145 - DNA, 21 bp, Artificial Sequence
  Description of Artificial Sequence: Synthetic oligonucleotide
cacccaggacaaagcccagtc

SEQ ID NO: 32146 - DNA, 21 bp, Artificial Sequence
  Description of Artificial Sequence: Synthetic oligonucleotide
cacccaggatacagcagcaac

SEQ ID NO: 32147 - DNA, 21 bp, Artificial Sequence
  Description of Artificial Sequence: Synthetic oligonucleotide
cacccaatcatcccaatcagc

SEQ ID NO: 32148 - DNA, 21 bp, Artificial Sequence
  Description of Artificial Sequence: Synthetic oligonucleotide
cacccaatcaacacaagaagc

SEQ ID NO: 32149 - DNA, 21 bp, Artificial Sequence
  Description of Artificial Sequence: Synthetic oligonucleotide
cacccaatcccattcccagga

SEQ ID NO: 32150 - DNA, 21 bp, Artificial Sequence
  Description of Artificial Sequence: Synthetic oligonucleotide
cacccaaaaggagaaccacca

SEQ ID NO: 32151 - DNA, 21 bp, Artificial Sequence
  Description of Artificial Sequence: Synthetic oligonucleotide
cacccaaaactcgtcagcgtc

SEQ ID NO: 32152 - DNA, 21 bp, Artificial Sequence
  Description of Artificial Sequence: Synthetic oligonucleotide
cacccactcgaagaccaactc

SEQ ID NO: 32153 - DNA, 21 bp, Artificial Sequence
  Description of Artificial Sequence: Synthetic oligonucleotide
cacccactcaacgcaagacca

SEQ ID NO: 32154 - DNA, 21 bp, Artificial Sequence
  Description of Artificial Sequence: Synthetic oligonucleotide
cacccaatgacaagcaacagc

SEQ ID NO: 32155 - DNA, 21 bp, Artificial Sequence
  Description of Artificial Sequence: Synthetic oligonucleotide
cacccaccaaaatacgtcaca

SEQ ID NO: 32156 - DNA, 21 bp, Artificial Sequence
  Description of Artificial Sequence: Synthetic oligonucleotide
cacccaccaccaagccacatg

SEQ ID NO: 32157 - DNA, 21 bp, Artificial Sequence
  Description of Artificial Sequence: Synthetic oligonucleotide
cacccaccaccaacagacagc

SEQ ID NO: 32158 - DNA, 21 bp, Artificial Sequence
  Description of Artificial Sequence: Synthetic oligonucleotide
cacccaccaagaacaccagca

SEQ ID NO: 32159 - DNA, 21 bp, Artificial Sequence
  Description of Artificial Sequence: Synthetic oligonucleotide
cacccacaaagacaagcaagc

SEQ ID NO: 32160 - DNA, 21 bp, Artificial Sequence
  Description of Artificial Sequence: Synthetic oligonucleotide
cacccacaaagcagccactgg

SEQ ID NO: 32161 - DNA, 21 bp, Artificial Sequence
  Description of Artificial Sequence: Synthetic oligonucleotide
cacccaagcttcagcccactc

SEQ ID NO: 32162 - DNA, 21 bp, Artificial Sequence
  Description of Artificial Sequence: Synthetic oligonucleotide
cacccaagcggatacagcaac

SEQ ID NO: 32163 - DNA, 21 bp, Artificial Sequence
  Description of Artificial Sequence: Synthetic oligonucleotide
cacccaagcatcgcaggaatg

SEQ ID NO: 32164 - DNA, 21 bp, Artificial Sequence
  Description of Artificial Sequence: Synthetic oligonucleotide
cacccaagcatcgtcagagac

SEQ ID NO: 32165 - DNA, 21 bp, Artificial Sequence
  Description of Artificial Sequence: Synthetic oligonucleotide
cacccaagcctcgcaatcgga

SEQ ID NO: 32166 - DNA, 21 bp, Artificial Sequence
  Description of Artificial Sequence: Synthetic oligonucleotide
cacccaagcagagtcatcatg

SEQ ID NO: 32167 - DNA, 21 bp, Artificial Sequence
  Description of Artificial Sequence: Synthetic oligonucleotide
cacccaagcagccaactccac

SEQ ID NO: 32168 - DNA, 21 bp, Artificial Sequence
  Description of Artificial Sequence: Synthetic oligonucleotide
cacccaagctacagcagcgga

SEQ ID NO: 32169 - DNA, 21 bp, Artificial Sequence
  Description of Artificial Sequence: Synthetic oligonucleotide
cacccaacagcaaaactccca

SEQ ID NO: 32170 - DNA, 21 bp, Artificial Sequence
  Description of Artificial Sequence: Synthetic oligonucleotide
cacccaacagaaacaacagaa

SEQ ID NO: 32171 - DNA, 21 bp, Artificial Sequence
  Description of Artificial Sequence: Synthetic oligonucleotide
cacccaacaggaacaaaagac

SEQ ID NO: 32172 - DNA, 21 bp, Artificial Sequence
  Description of Artificial Sequence: Synthetic oligonucleotide
cacccaacactcagccactac

SEQ ID NO: 32173 - DNA, 21 bp, Artificial Sequence
  Description of Artificial Sequence: Synthetic oligonucleotide
cacccaacaaacaacagcaac

SEQ ID NO: 32174 - DNA, 21 bp, Artificial Sequence
  Description of Artificial Sequence: Synthetic oligonucleotide
cacccaacaagcatcatcctc

SEQ ID NO: 32175 - DNA, 21 bp, Artificial Sequence
  Description of Artificial Sequence: Synthetic oligonucleotide
cacccaacaacaagattcgga

SEQ ID NO: 32176 - DNA, 21 bp, Artificial Sequence
  Description of Artificial Sequence: Synthetic oligonucleotide
cacccagtcagcagcagacaa

SEQ ID NO: 32177 - DNA, 21 bp, Artificial Sequence
  Description of Artificial Sequence: Synthetic oligonucleotide
cacccataccaaaacagcctc

SEQ ID NO: 32178 - DNA, 21 bp, Artificial Sequence
  Description of Artificial Sequence: Synthetic oligonucleotide
caccaagcagaagcatacagc

SEQ ID NO: 32179 - DNA, 21 bp, Artificial Sequence
  Description of Artificial Sequence: Synthetic oligonucleotide
caccaagcaccaggactccaa

SEQ ID NO: 32180 - DNA, 21 bp, Artificial Sequence
  Description of Artificial Sequence: Synthetic oligonucleotide
caccaagacatcgcacacctc

SEQ ID NO: 32181 - DNA, 21 bp, Artificial Sequence
  Description of Artificial Sequence: Synthetic oligonucleotide
caccaattcaacagagaacca

SEQ ID NO: 32182 - DNA, 21 bp, Artificial Sequence
  Description of Artificial Sequence: Synthetic oligonucleotide
caccaaggagaccaaaacatc

SEQ ID NO: 32183 - DNA, 21 bp, Artificial Sequence
  Description of Artificial Sequence: Synthetic oligonucleotide
caccaaggacacccaagagac

SEQ ID NO: 32184 - DNA, 21 bp, Artificial Sequence
  Description of Artificial Sequence: Synthetic oligonucleotide
caccaaggaagcccaacattc

SEQ ID NO: 32185 - DNA, 21 bp, Artificial Sequence
  Description of Artificial Sequence: Synthetic oligonucleotide
caccaactcggaagccaaatg

SEQ ID NO: 32186 - DNA, 21 bp, Artificial Sequence
  Description of Artificial Sequence: Synthetic oligonucleotide
caccaaccacacatcgtccaa

SEQ ID NO: 32187 - DNA, 21 bp, Artificial Sequence
  Description of Artificial Sequence: Synthetic oligonucleotide
caccaaccacacagcagcctc

SEQ ID NO: 32188 - DNA, 21 bp, Artificial Sequence
  Description of Artificial Sequence: Synthetic oligonucleotide
caccaacaaagcacaaacaac

SEQ ID NO: 32189 - DNA, 21 bp, Artificial Sequence
  Description of Artificial Sequence: Synthetic oligonucleotide
caccaaagaacagtcggagtc

SEQ ID NO: 32190 - DNA, 21 bp, Artificial Sequence
  Description of Artificial Sequence: Synthetic oligonucleotide
caccaaagcccaagcgacaga

SEQ ID NO: 32191 - DNA, 21 bp, Artificial Sequence
  Description of Artificial Sequence: Synthetic oligonucleotide
caccaaacagcaagcgtcctc

SEQ ID NO: 32192 - DNA, 21 bp, Artificial Sequence
  Description of Artificial Sequence: Synthetic oligonucleotide
caccaaacagtcggacaaaac

SEQ ID NO: 32193 - DNA, 21 bp, Artificial Sequence
  Description of Artificial Sequence: Synthetic oligonucleotide
cacagagcaagctacgtcgac

SEQ ID NO: 32194 - DNA, 21 bp, Artificial Sequence
  Description of Artificial Sequence: Synthetic oligonucleotide
cacagagacgcactccaacaa

SEQ ID NO: 32195 - DNA, 21 bp, Artificial Sequence
  Description of Artificial Sequence: Synthetic oligonucleotide
cacagagacatcagcacagga

SEQ ID NO: 32196 - DNA, 21 bp, Artificial Sequence
  Description of Artificial Sequence: Synthetic oligonucleotide
cacagagaagaaaaagcaagc

SEQ ID NO: 32197 - DNA, 21 bp, Artificial Sequence
  Description of Artificial Sequence: Synthetic oligonucleotide
cacagagaaggactcgaacac

SEQ ID NO: 32198 - DNA, 21 bp, Artificial Sequence
  Description of Artificial Sequence: Synthetic oligonucleotide
cacagagaacacggataccca

SEQ ID NO: 32199 - DNA, 21 bp, Artificial Sequence
  Description of Artificial Sequence: Synthetic oligonucleotide
cacagagaaaacaaagtcgca

SEQ ID NO: 32200 - DNA, 21 bp, Artificial Sequence
  Description of Artificial Sequence: Synthetic oligonucleotide
cacagaatcggagacgtccca

SEQ ID NO: 32201 - DNA, 21 bp, Artificial Sequence
  Description of Artificial Sequence: Synthetic oligonucleotide
cacagactcccaaacgtcgca

SEQ ID NO: 32202 - DNA, 21 bp, Artificial Sequence
  Description of Artificial Sequence: Synthetic oligonucleotide
cacagaccagaaatgctcagc

SEQ ID NO: 32203 - DNA, 21 bp, Artificial Sequence
  Description of Artificial Sequence: Synthetic oligonucleotide
cacagaccaatcgcaacatac

SEQ ID NO: 32204 - DNA, 21 bp, Artificial Sequence
  Description of Artificial Sequence: Synthetic oligonucleotide
cacagaacaggactcccagaa

SEQ ID NO: 32205 - DNA, 21 bp, Artificial Sequence
  Description of Artificial Sequence: Synthetic oligonucleotide
cacagaacaagcatgccactc

SEQ ID NO: 32206 - DNA, 21 bp, Artificial Sequence
  Description of Artificial Sequence: Synthetic oligonucleotide
cacagaacaacaaacaacttc

SEQ ID NO: 32207 - DNA, 21 bp, Artificial Sequence
  Description of Artificial Sequence: Synthetic oligonucleotide
cacagagtcggaggactcagc

SEQ ID NO: 32208 - DNA, 21 bp, Artificial Sequence
  Description of Artificial Sequence: Synthetic oligonucleotide
cacagagtcgtcgcaatccca

SEQ ID NO: 32209 - DNA, 21 bp, Artificial Sequence
  Description of Artificial Sequence: Synthetic oligonucleotide
cacagcgcagcactctgcatg

SEQ ID NO: 32210 - DNA, 21 bp, Artificial Sequence
  Description of Artificial Sequence: Synthetic oligonucleotide
cacagcgcagcaatgccaagc

SEQ ID NO: 32211 - DNA, 21 bp, Artificial Sequence
  Description of Artificial Sequence: Synthetic oligonucleotide
cacagcgcaggaacagaaaca

SEQ ID NO: 32212 - DNA, 21 bp, Artificial Sequence
  Description of Artificial Sequence: Synthetic oligonucleotide
cacagcgcaaaaatgagcgga

SEQ ID NO: 32213 - DNA, 21 bp, Artificial Sequence
  Description of Artificial Sequence: Synthetic oligonucleotide
cacagcgcaaaaagcatgcac

SEQ ID NO: 32214 - DNA, 21 bp, Artificial Sequence
  Description of Artificial Sequence: Synthetic oligonucleotide
cacagcgcactcctccacatg

SEQ ID NO: 32215 - DNA, 21 bp, Artificial Sequence
  Description of Artificial Sequence: Synthetic oligonucleotide
cacagcgcacaaatcacaatc

SEQ ID NO: 32216 - DNA, 21 bp, Artificial Sequence
  Description of Artificial Sequence: Synthetic oligonucleotide
cacagcgcaacaatgtgcagc

SEQ ID NO: 32217 - DNA, 21 bp, Artificial Sequence
  Description of Artificial Sequence: Synthetic oligonucleotide
cacagcgacagaagcagcgca

SEQ ID NO: 32218 - DNA, 21 bp, Artificial Sequence
  Description of Artificial Sequence: Synthetic oligonucleotide
cacagcgaaaaaagcggattc

SEQ ID NO: 32219 - DNA, 21 bp, Artificial Sequence
  Description of Artificial Sequence: Synthetic oligonucleotide
cacagcgaatacccaacaaaa

SEQ ID NO: 32220 - DNA, 21 bp, Artificial Sequence
  Description of Artificial Sequence: Synthetic oligonucleotide
cacagcttcctcgacctcgaa

SEQ ID NO: 32221 - DNA, 21 bp, Artificial Sequence
  Description of Artificial Sequence: Synthetic oligonucleotide
cacagcttcagcatgatggaa

SEQ ID NO: 32222 - DNA, 21 bp, Artificial Sequence
  Description of Artificial Sequence: Synthetic oligonucleotide
cacagcggacacagccaagga

SEQ ID NO: 32223 - DNA, 21 bp, Artificial Sequence
  Description of Artificial Sequence: Synthetic oligonucleotide
cacagcggaaaaatcctccac

SEQ ID NO: 32224 - DNA, 21 bp, Artificial Sequence
  Description of Artificial Sequence: Synthetic oligonucleotide
cacagcggaagagcatacagc

SEQ ID NO: 32225 - DNA, 21 bp, Artificial Sequence
  Description of Artificial Sequence: Synthetic oligonucleotide
cacagcggaagcagcgaaaca

SEQ ID NO: 32226 - DNA, 21 bp, Artificial Sequence
  Description of Artificial Sequence: Synthetic oligonucleotide
cacagccacggagtcccaagc

SEQ ID NO: 32227 - DNA, 21 bp, Artificial Sequence
  Description of Artificial Sequence: Synthetic oligonucleotide
cacagccacgtcaacagcagc

SEQ ID NO: 32228 - DNA, 21 bp, Artificial Sequence
  Description of Artificial Sequence: Synthetic oligonucleotide
cacagcatccacagcagagaa

SEQ ID NO: 32229 - DNA, 21 bp, Artificial Sequence
  Description of Artificial Sequence: Synthetic oligonucleotide
cacagcatccaacacatccca

SEQ ID NO: 32230 - DNA, 21 bp, Artificial Sequence
  Description of Artificial Sequence: Synthetic oligonucleotide
cacagcaaagcaagcgtcatc

SEQ ID NO: 32231 - DNA, 21 bp, Artificial Sequence
  Description of Artificial Sequence: Synthetic oligonucleotide
cacagcaaaccagcacaaatc

SEQ ID NO: 32232 - DNA, 21 bp, Artificial Sequence
  Description of Artificial Sequence: Synthetic oligonucleotide
cacagcaaaagcgtcgtcaca

SEQ ID NO: 32233 - DNA, 21 bp, Artificial Sequence
  Description of Artificial Sequence: Synthetic oligonucleotide
cacagcctcggagcaatccca

SEQ ID NO: 32234 - DNA, 21 bp, Artificial Sequence
  Description of Artificial Sequence: Synthetic oligonucleotide
cacagcctcggaacaagcgga

SEQ ID NO: 32235 - DNA, 21 bp, Artificial Sequence
  Description of Artificial Sequence: Synthetic oligonucleotide
cacagcctcctcaacagcaca

SEQ ID NO: 32236 - DNA, 21 bp, Artificial Sequence
  Description of Artificial Sequence: Synthetic oligonucleotide
cacagcctcccaggactcaaa

SEQ ID NO: 32237 - DNA, 21 bp, Artificial Sequence
  Description of Artificial Sequence: Synthetic oligonucleotide
cacagcctcagaacaccacaa

SEQ ID NO: 32238 - DNA, 21 bp, Artificial Sequence
  Description of Artificial Sequence: Synthetic oligonucleotide
cacagcatggaagaagcactc

SEQ ID NO: 32239 - DNA, 21 bp, Artificial Sequence
  Description of Artificial Sequence: Synthetic oligonucleotide
cacagcatgccagaccaaatc

SEQ ID NO: 32240 - DNA, 21 bp, Artificial Sequence
  Description of Artificial Sequence: Synthetic oligonucleotide
cacagcatgagcgaagcaaaa

SEQ ID NO: 32241 - DNA, 21 bp, Artificial Sequence
  Description of Artificial Sequence: Synthetic oligonucleotide
cacagcaacaaacaaccaaac

SEQ ID NO: 32242 - DNA, 21 bp, Artificial Sequence
  Description of Artificial Sequence: Synthetic oligonucleotide
cacagcaacaaaacaagcctc

SEQ ID NO: 32243 - DNA, 21 bp, Artificial Sequence
  Description of Artificial Sequence: Synthetic oligonucleotide
cacagcaacctcagagcaatg

SEQ ID NO: 32244 - DNA, 21 bp, Artificial Sequence
  Description of Artificial Sequence: Synthetic oligonucleotide
cacagcaacacaatcagcagc

SEQ ID NO: 32245 - DNA, 21 bp, Artificial Sequence
  Description of Artificial Sequence: Synthetic oligonucleotide
cacagcccagcaagaacagca

SEQ ID NO: 32246 - DNA, 21 bp, Artificial Sequence
  Description of Artificial Sequence: Synthetic oligonucleotide
cacagcccagcaagcccacca

SEQ ID NO: 32247 - DNA, 21 bp, Artificial Sequence
  Description of Artificial Sequence: Synthetic oligonucleotide
cacagcccaggacaaatcagc

SEQ ID NO: 32248 - DNA, 21 bp, Artificial Sequence
  Description of Artificial Sequence: Synthetic oligonucleotide
cacagcccaatggcagtccca

SEQ ID NO: 32249 - DNA, 21 bp, Artificial Sequence
  Description of Artificial Sequence: Synthetic oligonucleotide
cacagcccaaacggatacgca

SEQ ID NO: 32250 - DNA, 21 bp, Artificial Sequence
  Description of Artificial Sequence: Synthetic oligonucleotide
cacagccaagcacaaatgagc

SEQ ID NO: 32251 - DNA, 21 bp, Artificial Sequence
  Description of Artificial Sequence: Synthetic oligonucleotide
cacagccaaaaccaatacagc

SEQ ID NO: 32252 - DNA, 21 bp, Artificial Sequence
  Description of Artificial Sequence: Synthetic oligonucleotide
cacagccaaagagcagtccca

SEQ ID NO: 32253 - DNA, 21 bp, Artificial Sequence
  Description of Artificial Sequence: Synthetic oligonucleotide
cacagcagagcaagcccagaa

SEQ ID NO: 32254 - DNA, 21 bp, Artificial Sequence
  Description of Artificial Sequence: Synthetic oligonucleotide
cacagcagagacaacagaaac

SEQ ID NO: 32255 - DNA, 21 bp, Artificial Sequence
  Description of Artificial Sequence: Synthetic oligonucleotide
cacagcagagaactcagccca

SEQ ID NO: 32256 - DNA, 21 bp, Artificial Sequence
  Description of Artificial Sequence: Synthetic oligonucleotide
cacagcagaggaacaatgctc

SEQ ID NO: 32257 - DNA, 21 bp, Artificial Sequence
  Description of Artificial Sequence: Synthetic oligonucleotide
cacagcagacacgacatgctc

SEQ ID NO: 32258 - DNA, 21 bp, Artificial Sequence
  Description of Artificial Sequence: Synthetic oligonucleotide
cacagcagaccacaaccacaa

SEQ ID NO: 32259 - DNA, 21 bp, Artificial Sequence
  Description of Artificial Sequence: Synthetic oligonucleotide
cacagcagaccaagcggatgc

SEQ ID NO: 32260 - DNA, 21 bp, Artificial Sequence
  Description of Artificial Sequence: Synthetic oligonucleotide
cacagcagaagcacattcgca

SEQ ID NO: 32261 - DNA, 21 bp, Artificial Sequence
  Description of Artificial Sequence: Synthetic oligonucleotide
cacagcagcatcccaggacca

SEQ ID NO: 32262 - DNA, 21 bp, Artificial Sequence
  Description of Artificial Sequence: Synthetic oligonucleotide
cacagcagcatggcaacaatg

SEQ ID NO: 32263 - DNA, 21 bp, Artificial Sequence
  Description of Artificial Sequence: Synthetic oligonucleotide
cacagcagcaacctcggagtc

SEQ ID NO: 32264 - DNA, 21 bp, Artificial Sequence
  Description of Artificial Sequence: Synthetic oligonucleotide
cacagcagcagcgtcaaccca

SEQ ID NO: 32265 - DNA, 21 bp, Artificial Sequence
  Description of Artificial Sequence: Synthetic oligonucleotide
cacagcagcacaggagcaaac

SEQ ID NO: 32266 - DNA, 21 bp, Artificial Sequence
  Description of Artificial Sequence: Synthetic oligonucleotide
cacagcagcgtcccaggagca

SEQ ID NO: 32267 - DNA, 21 bp, Artificial Sequence
  Description of Artificial Sequence: Synthetic oligonucleotide
cacagcacagacagcctccca

SEQ ID NO: 32268 - DNA, 21 bp, Artificial Sequence
  Description of Artificial Sequence: Synthetic oligonucleotide
cacagcacacacagagaactc

SEQ ID NO: 32269 - DNA, 21 bp, Artificial Sequence
  Description of Artificial Sequence: Synthetic oligonucleotide
cacagcacactcatcagccac

SEQ ID NO: 32270 - DNA, 21 bp, Artificial Sequence
  Description of Artificial Sequence: Synthetic oligonucleotide
cacagcacaccactcaacagc

SEQ ID NO: 32271 - DNA, 21 bp, Artificial Sequence
  Description of Artificial Sequence: Synthetic oligonucleotide
cacagcacaagagaaggattc

SEQ ID NO: 32272 - DNA, 21 bp, Artificial Sequence
  Description of Artificial Sequence: Synthetic oligonucleotide
cacagcacaacagacccactc

SEQ ID NO: 32273 - DNA, 21 bp, Artificial Sequence
  Description of Artificial Sequence: Synthetic oligonucleotide
cacagcgtcgcaagcgtcaca

SEQ ID NO: 32274 - DNA, 21 bp, Artificial Sequence
  Description of Artificial Sequence: Synthetic oligonucleotide
cacagcgtcgacagcagagga

SEQ ID NO: 32275 - DNA, 21 bp, Artificial Sequence
  Description of Artificial Sequence: Synthetic oligonucleotide
cacagcgtcgaaagagaccac

SEQ ID NO: 32276 - DNA, 21 bp, Artificial Sequence
  Description of Artificial Sequence: Synthetic oligonucleotide
cacagctacgtcgacagcttc

SEQ ID NO: 32277 - DNA, 21 bp, Artificial Sequence
  Description of Artificial Sequence: Synthetic oligonucleotide
cacacagcaggagacgcagaa

SEQ ID NO: 32278 - DNA, 21 bp, Artificial Sequence
  Description of Artificial Sequence: Synthetic oligonucleotide
cacacagcactcctcagcaac

SEQ ID NO: 32279 - DNA, 21 bp, Artificial Sequence
  Description of Artificial Sequence: Synthetic oligonucleotide
cacacagcaagaacaacacca

SEQ ID NO: 32280 - DNA, 21 bp, Artificial Sequence
  Description of Artificial Sequence: Synthetic oligonucleotide
cacacagcaagcctcccagca

SEQ ID NO: 32281 - DNA, 21 bp, Artificial Sequence
  Description of Artificial Sequence: Synthetic oligonucleotide
cacacagacagatacgcagtc

SEQ ID NO: 32282 - DNA, 21 bp, Artificial Sequence
  Description of Artificial Sequence: Synthetic oligonucleotide
cacacagaagcaggaagagtc

SEQ ID NO: 32283 - DNA, 21 bp, Artificial Sequence
  Description of Artificial Sequence: Synthetic oligonucleotide
cacacagaaacattcggagaa

SEQ ID NO: 32284 - DNA, 21 bp, Artificial Sequence
  Description of Artificial Sequence: Synthetic oligonucleotide
cacacaggactcgtcagagga

SEQ ID NO: 32285 - DNA, 21 bp, Artificial Sequence
  Description of Artificial Sequence: Synthetic oligonucleotide
cacacaggaagcctcagcagc

SEQ ID NO: 32286 - DNA, 21 bp, Artificial Sequence
  Description of Artificial Sequence: Synthetic oligonucleotide
cacacacacctcgcaagcctc

SEQ ID NO: 32287 - DNA, 21 bp, Artificial Sequence
  Description of Artificial Sequence: Synthetic oligonucleotide
cacacaatcaaagacgcatac

SEQ ID NO: 32288 - DNA, 21 bp, Artificial Sequence
  Description of Artificial Sequence: Synthetic oligonucleotide
cacacaaaaagcccacaccca

SEQ ID NO: 32289 - DNA, 21 bp, Artificial Sequence
  Description of Artificial Sequence: Synthetic oligonucleotide
cacacactcaaaccagacgtc

SEQ ID NO: 32290 - DNA, 21 bp, Artificial Sequence
  Description of Artificial Sequence: Synthetic oligonucleotide
cacacactcccaagcacaagc

SEQ ID NO: 32291 - DNA, 21 bp, Artificial Sequence
  Description of Artificial Sequence: Synthetic oligonucleotide
cacacactcccaacaacagca

SEQ ID NO: 32292 - DNA, 21 bp, Artificial Sequence
  Description of Artificial Sequence: Synthetic oligonucleotide
cacacaatggcaagcggaagc

SEQ ID NO: 32293 - DNA, 21 bp, Artificial Sequence
  Description of Artificial Sequence: Synthetic oligonucleotide
cacacaaacagcaacacagga

SEQ ID NO: 32294 - DNA, 21 bp, Artificial Sequence
  Description of Artificial Sequence: Synthetic oligonucleotide
cacacaccagcagtcaacttc

SEQ ID NO: 32295 - DNA, 21 bp, Artificial Sequence
  Description of Artificial Sequence: Synthetic oligonucleotide
cacacaccaggactccacaca

SEQ ID NO: 32296 - DNA, 21 bp, Artificial Sequence
  Description of Artificial Sequence: Synthetic oligonucleotide
cacacaccactcacaagccac

SEQ ID NO: 32297 - DNA, 21 bp, Artificial Sequence
  Description of Artificial Sequence: Synthetic oligonucleotide
cacacaccaaacatcctctac

SEQ ID NO: 32298 - DNA, 21 bp, Artificial Sequence
  Description of Artificial Sequence: Synthetic oligonucleotide
cacacaccacaaccaaacgca

SEQ ID NO: 32299 - DNA, 21 bp, Artificial Sequence
  Description of Artificial Sequence: Synthetic oligonucleotide
cacacacaactcagaacacca

SEQ ID NO: 32300 - DNA, 21 bp, Artificial Sequence
  Description of Artificial Sequence: Synthetic oligonucleotide
cacacacaaagactcagcagc

SEQ ID NO: 32301 - DNA, 21 bp, Artificial Sequence
  Description of Artificial Sequence: Synthetic oligonucleotide
cacacacaagtcacaagatgc

SEQ ID NO: 32302 - DNA, 21 bp, Artificial Sequence
  Description of Artificial Sequence: Synthetic oligonucleotide
cacacaagagacagcgaccca

SEQ ID NO: 32303 - DNA, 21 bp, Artificial Sequence
  Description of Artificial Sequence: Synthetic oligonucleotide
cacacaagaggaaaagcagaa

SEQ ID NO: 32304 - DNA, 21 bp, Artificial Sequence
  Description of Artificial Sequence: Synthetic oligonucleotide
cacacaagcggagaaagctac

SEQ ID NO: 32305 - DNA, 21 bp, Artificial Sequence
  Description of Artificial Sequence: Synthetic oligonucleotide
cacacaagccaccaactccca

SEQ ID NO: 32306 - DNA, 21 bp, Artificial Sequence
  Description of Artificial Sequence: Synthetic oligonucleotide
cacacaagcatcgactacgtc

SEQ ID NO: 32307 - DNA, 21 bp, Artificial Sequence
  Description of Artificial Sequence: Synthetic oligonucleotide
cacacaagcaaaagcgcactc

SEQ ID NO: 32308 - DNA, 21 bp, Artificial Sequence
  Description of Artificial Sequence: Synthetic oligonucleotide
cacacaagcccaccaatcagc

SEQ ID NO: 32309 - DNA, 21 bp, Artificial Sequence
  Description of Artificial Sequence: Synthetic oligonucleotide
cacacaagcccagtctacgac

SEQ ID NO: 32310 - DNA, 21 bp, Artificial Sequence
  Description of Artificial Sequence: Synthetic oligonucleotide
cacacaagccaacaaagacaa

SEQ ID NO: 32311 - DNA, 21 bp, Artificial Sequence
  Description of Artificial Sequence: Synthetic oligonucleotide
cacacaagcacaacaaaatgg

SEQ ID NO: 32312 - DNA, 21 bp, Artificial Sequence
  Description of Artificial Sequence: Synthetic oligonucleotide
cacacaagctgggacggactc

SEQ ID NO: 32313 - DNA, 21 bp, Artificial Sequence
  Description of Artificial Sequence: Synthetic oligonucleotide
cacacaacagcagcaccacca

SEQ ID NO: 32314 - DNA, 21 bp, Artificial Sequence
  Description of Artificial Sequence: Synthetic oligonucleotide
cacacaacaaaagtcgaccca

SEQ ID NO: 32315 - DNA, 21 bp, Artificial Sequence
  Description of Artificial Sequence: Synthetic oligonucleotide
cacacaacaccaacacacaca

SEQ ID NO: 32316 - DNA, 21 bp, Artificial Sequence
  Description of Artificial Sequence: Synthetic oligonucleotide
cacacaacacaatgcacaatg

SEQ ID NO: 32317 - DNA, 21 bp, Artificial Sequence
  Description of Artificial Sequence: Synthetic oligonucleotide
cacacaacaacaatccacgga

SEQ ID NO: 32318 - DNA, 21 bp, Artificial Sequence
  Description of Artificial Sequence: Synthetic oligonucleotide
cacacagtcagaagcggactc

SEQ ID NO: 32319 - DNA, 21 bp, Artificial Sequence
  Description of Artificial Sequence: Synthetic oligonucleotide
cacacagtcacaagcgcagga

SEQ ID NO: 32320 - DNA, 21 bp, Artificial Sequence
  Description of Artificial Sequence: Synthetic oligonucleotide
cacacagtcgtccaaagcagc

SEQ ID NO: 32321 - DNA, 21 bp, Artificial Sequence
  Description of Artificial Sequence: Synthetic oligonucleotide
cacacatacagcagcgaagac

SEQ ID NO: 32322 - DNA, 21 bp, Artificial Sequence
  Description of Artificial Sequence: Synthetic oligonucleotide
cacgtcgacagaagcggagca

SEQ ID NO: 32323 - DNA, 21 bp, Artificial Sequence
  Description of Artificial Sequence: Synthetic oligonucleotide
cacgtcgacagaacacaattc

SEQ ID NO: 32324 - DNA, 21 bp, Artificial Sequence
  Description of Artificial Sequence: Synthetic oligonucleotide
cacgtcggaatcacaagcgca

SEQ ID NO: 32325 - DNA, 21 bp, Artificial Sequence
  Description of Artificial Sequence: Synthetic oligonucleotide
cacgtcggatacggaccaagc

SEQ ID NO: 32326 - DNA, 21 bp, Artificial Sequence
  Description of Artificial Sequence: Synthetic oligonucleotide
cacgtcggatacaaagcagac

SEQ ID NO: 32327 - DNA, 21 bp, Artificial Sequence
  Description of Artificial Sequence: Synthetic oligonucleotide
cacgtccacacaaacagcagc

SEQ ID NO: 32328 - DNA, 21 bp, Artificial Sequence
  Description of Artificial Sequence: Synthetic oligonucleotide
cacgtcatcgacagcgcagga

SEQ ID NO: 32329 - DNA, 21 bp, Artificial Sequence
  Description of Artificial Sequence: Synthetic oligonucleotide
cacgtcaaagcactcggaagc

SEQ ID NO: 32330 - DNA, 21 bp, Artificial Sequence
  Description of Artificial Sequence: Synthetic oligonucleotide
cacgtcaaactcagcagcaac

SEQ ID NO: 32331 - DNA, 21 bp, Artificial Sequence
  Description of Artificial Sequence: Synthetic oligonucleotide
cacgtcctcaaaaacccaaca

SEQ ID NO: 32332 - DNA, 21 bp, Artificial Sequence
  Description of Artificial Sequence: Synthetic oligonucleotide
cacgtcctcccaacaagacca

SEQ ID NO: 32333 - DNA, 21 bp, Artificial Sequence
  Description of Artificial Sequence: Synthetic oligonucleotide
cacgtcctcagcccaacaaga

SEQ ID NO: 32334 - DNA, 21 bp, Artificial Sequence
  Description of Artificial Sequence: Synthetic oligonucleotide
cacgtcatggaagcaagcagc

SEQ ID NO: 32335 - DNA, 21 bp, Artificial Sequence
  Description of Artificial Sequence: Synthetic oligonucleotide
cacgtcccaatgagcatgcca

SEQ ID NO: 32336 - DNA, 21 bp, Artificial Sequence
  Description of Artificial Sequence: Synthetic oligonucleotide
cacgtccaaaacagccaaaca

SEQ ID NO: 32337 - DNA, 21 bp, Artificial Sequence
  Description of Artificial Sequence: Synthetic oligonucleotide
cacgtcagaggaacaggaagc

SEQ ID NO: 32338 - DNA, 21 bp, Artificial Sequence
  Description of Artificial Sequence: Synthetic oligonucleotide
cacgtcagaccaggattcaca

SEQ ID NO: 32339 - DNA, 21 bp, Artificial Sequence
  Description of Artificial Sequence: Synthetic oligonucleotide
cacgtcagcgaacacacatac

SEQ ID NO: 32340 - DNA, 21 bp, Artificial Sequence
  Description of Artificial Sequence: Synthetic oligonucleotide
cacgtcagcggaccaagagca

SEQ ID NO: 32341 - DNA, 21 bp, Artificial Sequence
  Description of Artificial Sequence: Synthetic oligonucleotide
cacgtcagccacgcaatgcaa

SEQ ID NO: 32342 - DNA, 21 bp, Artificial Sequence
  Description of Artificial Sequence: Synthetic oligonucleotide
cacgtcagccacagcgtcatc

SEQ ID NO: 32343 - DNA, 21 bp, Artificial Sequence
  Description of Artificial Sequence: Synthetic oligonucleotide
cacgtcagcaaactcgacaca

SEQ ID NO: 32344 - DNA, 21 bp, Artificial Sequence
  Description of Artificial Sequence: Synthetic oligonucleotide
cacgtcagcatgagcgtccca

SEQ ID NO: 32345 - DNA, 21 bp, Artificial Sequence
  Description of Artificial Sequence: Synthetic oligonucleotide
cacgtcagcaacatcatcagc

SEQ ID NO: 32346 - DNA, 21 bp, Artificial Sequence
  Description of Artificial Sequence: Synthetic oligonucleotide
cacgtcagcaaccaactcaac

SEQ ID NO: 32347 - DNA, 21 bp, Artificial Sequence
  Description of Artificial Sequence: Synthetic oligonucleotide
cacgtcagcccaccagcaaac

SEQ ID NO: 32348 - DNA, 21 bp, Artificial Sequence
  Description of Artificial Sequence: Synthetic oligonucleotide
cacgtcagcagcgcaagcctc

SEQ ID NO: 32349 - DNA, 21 bp, Artificial Sequence
  Description of Artificial Sequence: Synthetic oligonucleotide
cacgtcagcagcgacagcaga

SEQ ID NO: 32350 - DNA, 21 bp, Artificial Sequence
  Description of Artificial Sequence: Synthetic oligonucleotide
cacgtcagcagcccaagcctc

SEQ ID NO: 32351 - DNA, 21 bp, Artificial Sequence
  Description of Artificial Sequence: Synthetic oligonucleotide
cacgtcagcacagaaccaagc

SEQ ID NO: 32352 - DNA, 21 bp, Artificial Sequence
  Description of Artificial Sequence: Synthetic oligonucleotide
cacgtcagctacgacctcaca

SEQ ID NO: 32353 - DNA, 21 bp, Artificial Sequence
  Description of Artificial Sequence: Synthetic oligonucleotide
cacgtcacaccaggattcgaa

SEQ ID NO: 32354 - DNA, 21 bp, Artificial Sequence
  Description of Artificial Sequence: Synthetic oligonucleotide
cacgtcacaagcccatacctc

SEQ ID NO: 32355 - DNA, 21 bp, Artificial Sequence
  Description of Artificial Sequence: Synthetic oligonucleotide
cacgtcgtcggaggaagcagc

SEQ ID NO: 32356 - DNA, 21 bp, Artificial Sequence
  Description of Artificial Sequence: Synthetic oligonucleotide
cacgtcgtcagcagattcgtc

SEQ ID NO: 32357 - DNA, 21 bp, Artificial Sequence
  Description of Artificial Sequence: Synthetic oligonucleotide
cactacgcaccaatctgcgaa

SEQ ID NO: 32358 - DNA, 21 bp, Artificial Sequence
  Description of Artificial Sequence: Synthetic oligonucleotide
cactacgacagcaacgcacca

SEQ ID NO: 32359 - DNA, 21 bp, Artificial Sequence
  Description of Artificial Sequence: Synthetic oligonucleotide
cactacgaattcgtcgacaaa

SEQ ID NO: 32360 - DNA, 21 bp, Artificial Sequence
  Description of Artificial Sequence: Synthetic oligonucleotide
cactacgaaagctgcaaccca

SEQ ID NO: 32361 - DNA, 21 bp, Artificial Sequence
  Description of Artificial Sequence: Synthetic oligonucleotide
cactacgaaagcaacgacgtc

SEQ ID NO: 32362 - DNA, 21 bp, Artificial Sequence
  Description of Artificial Sequence: Synthetic oligonucleotide
cactacttcgacatgggacca

SEQ ID NO: 32363 - DNA, 21 bp, Artificial Sequence
  Description of Artificial Sequence: Synthetic oligonucleotide
cactacggaatggtcagcgca

SEQ ID NO: 32364 - DNA, 21 bp, Artificial Sequence
  Description of Artificial Sequence: Synthetic oligonucleotide
cactacggaagcacaagagaa

SEQ ID NO: 32365 - DNA, 21 bp, Artificial Sequence
  Description of Artificial Sequence: Synthetic oligonucleotide
cactacatcaacccaacaaac

SEQ ID NO: 32366 - DNA, 21 bp, Artificial Sequence
  Description of Artificial Sequence: Synthetic oligonucleotide
cactacccaccaacatacgac

SEQ ID NO: 32367 - DNA, 21 bp, Artificial Sequence
  Description of Artificial Sequence: Synthetic oligonucleotide
cactacccaagcacaagcagc

SEQ ID NO: 32368 - DNA, 21 bp, Artificial Sequence
  Description of Artificial Sequence: Synthetic oligonucleotide
cactaccaaatcagcacaaca

SEQ ID NO: 32369 - DNA, 21 bp, Artificial Sequence
  Description of Artificial Sequence: Synthetic oligonucleotide
cactacagcatcagcggagca

SEQ ID NO: 32370 - DNA, 21 bp, Artificial Sequence
  Description of Artificial Sequence: Synthetic oligonucleotide
cactacagcccaaaaccaagc

SEQ ID NO: 32371 - DNA, 21 bp, Artificial Sequence
  Description of Artificial Sequence: Synthetic oligonucleotide
cactacgtcgaacacagacaa

SEQ ID NO: 32372 - DNA, 21 bp, Artificial Sequence
  Description of Artificial Sequence: Synthetic oligonucleotide
atcgcagcagcagcaatgaca

SEQ ID NO: 32373 - DNA, 21 bp, Artificial Sequence
  Description of Artificial Sequence: Synthetic oligonucleotide
atcgcagcaaacatgcacaac

SEQ ID NO: 32374 - DNA, 21 bp, Artificial Sequence
  Description of Artificial Sequence: Synthetic oligonucleotide
atcgcagcaacaccagaacaa

SEQ ID NO: 32375 - DNA, 21 bp, Artificial Sequence
  Description of Artificial Sequence: Synthetic oligonucleotide
atcgcatgcagcagcgaactc

SEQ ID NO: 32376 - DNA, 21 bp, Artificial Sequence
  Description of Artificial Sequence: Synthetic oligonucleotide
atcgcagacgtcctcggatac

SEQ ID NO: 32377 - DNA, 21 bp, Artificial Sequence
  Description of Artificial Sequence: Synthetic oligonucleotide
atcgcaggaatcagcgacatc

SEQ ID NO: 32378 - DNA, 21 bp, Artificial Sequence
  Description of Artificial Sequence: Synthetic oligonucleotide
atcgcacacgaaagaagcgac

SEQ ID NO: 32379 - DNA, 21 bp, Artificial Sequence
  Description of Artificial Sequence: Synthetic oligonucleotide
atcgcacacagagcaagcgca

SEQ ID NO: 32380 - DNA, 21 bp, Artificial Sequence
  Description of Artificial Sequence: Synthetic oligonucleotide
atcgcactcccaaaagtcgca

SEQ ID NO: 32381 - DNA, 21 bp, Artificial Sequence
  Description of Artificial Sequence: Synthetic oligonucleotide
atcgcaaacctcacacaaagc

SEQ ID NO: 32382 - DNA, 21 bp, Artificial Sequence
  Description of Artificial Sequence: Synthetic oligonucleotide
atcgcaccaggagtcagcagc

SEQ ID NO: 32383 - DNA, 21 bp, Artificial Sequence
  Description of Artificial Sequence: Synthetic oligonucleotide
atcgcaccactcacagtcagc

SEQ ID NO: 32384 - DNA, 21 bp, Artificial Sequence
  Description of Artificial Sequence: Synthetic oligonucleotide
atcgcaccaaacaaactcaca

SEQ ID NO: 32385 - DNA, 21 bp, Artificial Sequence
  Description of Artificial Sequence: Synthetic oligonucleotide
atcgcacaacaacaccaaatc

SEQ ID NO: 32386 - DNA, 21 bp, Artificial Sequence
  Description of Artificial Sequence: Synthetic oligonucleotide
atcgcaagagcagcaaacttc

SEQ ID NO: 32387 - DNA, 21 bp, Artificial Sequence
  Description of Artificial Sequence: Synthetic oligonucleotide
atcgcaagaggacaaccattc

SEQ ID NO: 32388 - DNA, 21 bp, Artificial Sequence
  Description of Artificial Sequence: Synthetic oligonucleotide
atcgcaagaggatacgacaac

SEQ ID NO: 32389 - DNA, 21 bp, Artificial Sequence
  Description of Artificial Sequence: Synthetic oligonucleotide
atcgcaagacacccaacacaa

SEQ ID NO: 32390 - DNA, 21 bp, Artificial Sequence
  Description of Artificial Sequence: Synthetic oligonucleotide
atcgcaagcgaatacagacaa

SEQ ID NO: 32391 - DNA, 21 bp, Artificial Sequence
  Description of Artificial Sequence: Synthetic oligonucleotide
atcgcaagcagccaactcaga

SEQ ID NO: 32392 - DNA, 21 bp, Artificial Sequence
  Description of Artificial Sequence: Synthetic oligonucleotide
atcgcaacaccagaaagcctc

SEQ ID NO: 32393 - DNA, 21 bp, Artificial Sequence
  Description of Artificial Sequence: Synthetic oligonucleotide
atcgcagtccacggaagagga

SEQ ID NO: 32394 - DNA, 21 bp, Artificial Sequence
  Description of Artificial Sequence: Synthetic oligonucleotide
atcgacgcaagcaaaagattc

SEQ ID NO: 32395 - DNA, 21 bp, Artificial Sequence
  Description of Artificial Sequence: Synthetic oligonucleotide
atcgacggaggaagcagcgac

SEQ ID NO: 32396 - DNA, 21 bp, Artificial Sequence
  Description of Artificial Sequence: Synthetic oligonucleotide
atcgacggaagagtcatcgga

SEQ ID NO: 32397 - DNA, 21 bp, Artificial Sequence
  Description of Artificial Sequence: Synthetic oligonucleotide
atcgacaaactcctcacattc

SEQ ID NO: 32398 - DNA, 21 bp, Artificial Sequence
  Description of Artificial Sequence: Synthetic oligonucleotide
atcgacctcctcgtcagaagc

SEQ ID NO: 32399 - DNA, 21 bp, Artificial Sequence
  Description of Artificial Sequence: Synthetic oligonucleotide
atcgacaacctccacgcagga

SEQ ID NO: 32400 - DNA, 21 bp, Artificial Sequence
  Description of Artificial Sequence: Synthetic oligonucleotide
atcgacaacccagtcagacca

SEQ ID NO: 32401 - DNA, 21 bp, Artificial Sequence
  Description of Artificial Sequence: Synthetic oligonucleotide
atcgacaacgtcaaaccagtc

SEQ ID NO: 32402 - DNA, 21 bp, Artificial Sequence
  Description of Artificial Sequence: Synthetic oligonucleotide
atcgacagcgcaacaacagac

SEQ ID NO: 32403 - DNA, 21 bp, Artificial Sequence
  Description of Artificial Sequence: Synthetic oligonucleotide
atcgacagccacccaagcagc

SEQ ID NO: 32404 - DNA, 21 bp, Artificial Sequence
  Description of Artificial Sequence: Synthetic oligonucleotide
atcgacagcagcacaaactgc

SEQ ID NO: 32405 - DNA, 21 bp, Artificial Sequence
  Description of Artificial Sequence: Synthetic oligonucleotide
atcgacagctacacaccacca

SEQ ID NO: 32406 - DNA, 21 bp, Artificial Sequence
  Description of Artificial Sequence: Synthetic oligonucleotide
atcgacacaatcagcacaagc

SEQ ID NO: 32407 - DNA, 21 bp, Artificial Sequence
  Description of Artificial Sequence: Synthetic oligonucleotide
atcgacacaccaagaggaaca

SEQ ID NO: 32408 - DNA, 21 bp, Artificial Sequence
  Description of Artificial Sequence: Synthetic oligonucleotide
atcgacacagtcccaagcaga

SEQ ID NO: 32409 - DNA, 21 bp, Artificial Sequence
  Description of Artificial Sequence: Synthetic oligonucleotide
atcgacgtcttcacaaacgca

SEQ ID NO: 32410 - DNA, 21 bp, Artificial Sequence
  Description of Artificial Sequence: Synthetic oligonucleotide
atcgactacaaaagcagcagc

SEQ ID NO: 32411 - DNA, 21 bp, Artificial Sequence
  Description of Artificial Sequence: Synthetic oligonucleotide
atcgactacagagcagcagca

SEQ ID NO: 32412 - DNA, 21 bp, Artificial Sequence
  Description of Artificial Sequence: Synthetic oligonucleotide
atcgaagcaagcagagtccaa

SEQ ID NO: 32413 - DNA, 21 bp, Artificial Sequence
  Description of Artificial Sequence: Synthetic oligonucleotide
atcgaaaaaaacctcacactc

SEQ ID NO: 32414 - DNA, 21 bp, Artificial Sequence
  Description of Artificial Sequence: Synthetic oligonucleotide
atcgaaaaagtcaacagagtc

SEQ ID NO: 32415 - DNA, 21 bp, Artificial Sequence
  Description of Artificial Sequence: Synthetic oligonucleotide
atcgaactcgcaagcagctgc

SEQ ID NO: 32416 - DNA, 21 bp, Artificial Sequence
  Description of Artificial Sequence: Synthetic oligonucleotide
atcgaactcaaaatgacaagc

SEQ ID NO: 32417 - DNA, 21 bp, Artificial Sequence
  Description of Artificial Sequence: Synthetic oligonucleotide
atcgaaatgctcaaaacagca

SEQ ID NO: 32418 - DNA, 21 bp, Artificial Sequence
  Description of Artificial Sequence: Synthetic oligonucleotide
atcgaaccaaaaacacacctc

SEQ ID NO: 32419 - DNA, 21 bp, Artificial Sequence
  Description of Artificial Sequence: Synthetic oligonucleotide
atcgaaccaagccactaccca

SEQ ID NO: 32420 - DNA, 21 bp, Artificial Sequence
  Description of Artificial Sequence: Synthetic oligonucleotide
atcgaaagaccaacaagccca

SEQ ID NO: 32421 - DNA, 21 bp, Artificial Sequence
  Description of Artificial Sequence: Synthetic oligonucleotide
atcgaaagaacaagcagcatg

SEQ ID NO: 32422 - DNA, 21 bp, Artificial Sequence
  Description of Artificial Sequence: Synthetic oligonucleotide
atcgaaagcgcaaacctcaac

SEQ ID NO: 32423 - DNA, 21 bp, Artificial Sequence
  Description of Artificial Sequence: Synthetic oligonucleotide
atcgaaagccacctcccaaga

SEQ ID NO: 32424 - DNA, 21 bp, Artificial Sequence
  Description of Artificial Sequence: Synthetic oligonucleotide
atcgaaacagcaccagaccac

SEQ ID NO: 32425 - DNA, 21 bp, Artificial Sequence
  Description of Artificial Sequence: Synthetic oligonucleotide
atcgaaacagtcaacaaaaca

SEQ ID NO: 32426 - DNA, 21 bp, Artificial Sequence
  Description of Artificial Sequence: Synthetic oligonucleotide
atcgaagtcagaacaagcatc

SEQ ID NO: 32427 - DNA, 21 bp, Artificial Sequence
  Description of Artificial Sequence: Synthetic oligonucleotide
atcgaatggggatgggaagac

SEQ ID NO: 32428 - DNA, 21 bp, Artificial Sequence
  Description of Artificial Sequence: Synthetic oligonucleotide
atcttcgcaggaacaggagaa

SEQ ID NO: 32429 - DNA, 21 bp, Artificial Sequence
  Description of Artificial Sequence: Synthetic oligonucleotide
atcttcgcaggagtcctccac

SEQ ID NO: 32430 - DNA, 21 bp, Artificial Sequence
  Description of Artificial Sequence: Synthetic oligonucleotide
atcttcgcagtcgcagcagaa

SEQ ID NO: 32431 - DNA, 21 bp, Artificial Sequence
  Description of Artificial Sequence: Synthetic oligonucleotide
atcttcaaaccagcaatgaca

SEQ ID NO: 32432 - DNA, 21 bp, Artificial Sequence
  Description of Artificial Sequence: Synthetic oligonucleotide
atcttcaacaacgcagcacca

SEQ ID NO: 32433 - DNA, 21 bp, Artificial Sequence
  Description of Artificial Sequence: Synthetic oligonucleotide
atcttcccactcacaggaagc

SEQ ID NO: 32434 - DNA, 21 bp, Artificial Sequence
  Description of Artificial Sequence: Synthetic oligonucleotide
atcttcagagacggagtcagc

SEQ ID NO: 32435 - DNA, 21 bp, Artificial Sequence
  Description of Artificial Sequence: Synthetic oligonucleotide
atcttcagcgcaggaccactc

SEQ ID NO: 32436 - DNA, 21 bp, Artificial Sequence
  Description of Artificial Sequence: Synthetic oligonucleotide
atcttcagccacgtcggaagc

SEQ ID NO: 32437 - DNA, 21 bp, Artificial Sequence
  Description of Artificial Sequence: Synthetic oligonucleotide
atcttcgtcccagaaccagga

SEQ ID NO: 32438 - DNA, 21 bp, Artificial Sequence
  Description of Artificial Sequence: Synthetic oligonucleotide
atcggagcaggagcaagcatg

SEQ ID NO: 32439 - DNA, 21 bp, Artificial Sequence
  Description of Artificial Sequence: Synthetic oligonucleotide
atcggagcaatcgcagacgtc

SEQ ID NO: 32440 - DNA, 21 bp, Artificial Sequence
  Description of Artificial Sequence: Synthetic oligonucleotide
atcggagcactcgtcagccca

SEQ ID NO: 32441 - DNA, 21 bp, Artificial Sequence
  Description of Artificial Sequence: Synthetic oligonucleotide
atcggagcaatgagcagcgca

SEQ ID NO: 32442 - DNA, 21 bp, Artificial Sequence
  Description of Artificial Sequence: Synthetic oligonucleotide
atcggagcaccatacaacagc

SEQ ID NO: 32443 - DNA, 21 bp, Artificial Sequence
  Description of Artificial Sequence: Synthetic oligonucleotide
atcggagcaagcctcctcgga

SEQ ID NO: 32444 - DNA, 21 bp, Artificial Sequence
  Description of Artificial Sequence: Synthetic oligonucleotide
atcggagaaagaagaccagtc

SEQ ID NO: 32445 - DNA, 21 bp, Artificial Sequence
  Description of Artificial Sequence: Synthetic oligonucleotide
atcggaggattcgtcaaagca

SEQ ID NO: 32446 - DNA, 21 bp, Artificial Sequence
  Description of Artificial Sequence: Synthetic oligonucleotide
atcggaggaacaatgacacac

SEQ ID NO: 32447 - DNA, 21 bp, Artificial Sequence
  Description of Artificial Sequence: Synthetic oligonucleotide
atcggacacggacacccaaac

SEQ ID NO: 32448 - DNA, 21 bp, Artificial Sequence
  Description of Artificial Sequence: Synthetic oligonucleotide
atcggacacagcgacaacaca

SEQ ID NO: 32449 - DNA, 21 bp, Artificial Sequence
  Description of Artificial Sequence: Synthetic oligonucleotide
atcggaaaactcctcaacaca

SEQ ID NO: 32450 - DNA, 21 bp, Artificial Sequence
  Description of Artificial Sequence: Synthetic oligonucleotide
atcggaaaaaaccacagcagc

SEQ ID NO: 32451 - DNA, 21 bp, Artificial Sequence
  Description of Artificial Sequence: Synthetic oligonucleotide
atcggaaaaccaggatacctc

SEQ ID NO: 32452 - DNA, 21 bp, Artificial Sequence
  Description of Artificial Sequence: Synthetic oligonucleotide
atcggactcgcaaaaacactc

SEQ ID NO: 32453 - DNA, 21 bp, Artificial Sequence
  Description of Artificial Sequence: Synthetic oligonucleotide
atcggactcacaagccaagtc

SEQ ID NO: 32454 - DNA, 21 bp, Artificial Sequence
  Description of Artificial Sequence: Synthetic oligonucleotide
atcggaatgcacagccaaagc

SEQ ID NO: 32455 - DNA, 21 bp, Artificial Sequence
  Description of Artificial Sequence: Synthetic oligonucleotide
atcggaaacagcagactcgga

SEQ ID NO: 32456 - DNA, 21 bp, Artificial Sequence
  Description of Artificial Sequence: Synthetic oligonucleotide
atcggacaattcagcagagtc

SEQ ID NO: 32457 - DNA, 21 bp, Artificial Sequence
  Description of Artificial Sequence: Synthetic oligonucleotide
atcggaagagacatgcacgca

SEQ ID NO: 32458 - DNA, 21 bp, Artificial Sequence
  Description of Artificial Sequence: Synthetic oligonucleotide
atcggaagaccaagctacgaa

SEQ ID NO: 32459 - DNA, 21 bp, Artificial Sequence
  Description of Artificial Sequence: Synthetic oligonucleotide
atcggaagacaaacaggaatc

SEQ ID NO: 32460 - DNA, 21 bp, Artificial Sequence
  Description of Artificial Sequence: Synthetic oligonucleotide
atcggaagaagcgaaggaaca

SEQ ID NO: 32461 - DNA, 21 bp, Artificial Sequence
  Description of Artificial Sequence: Synthetic oligonucleotide
atcggaagaagcccaagccca

SEQ ID NO: 32462 - DNA, 21 bp, Artificial Sequence
  Description of Artificial Sequence: Synthetic oligonucleotide
atcggaagccaccacagcaac

SEQ ID NO: 32463 - DNA, 21 bp, Artificial Sequence
  Description of Artificial Sequence: Synthetic oligonucleotide
atcggaagcaacgcactcagc

SEQ ID NO: 32464 - DNA, 21 bp, Artificial Sequence
  Description of Artificial Sequence: Synthetic oligonucleotide
atcggaagcacaatgtaccaa

SEQ ID NO: 32465 - DNA, 21 bp, Artificial Sequence
  Description of Artificial Sequence: Synthetic oligonucleotide
atcggaacaagcacatacgtc

SEQ ID NO: 32466 - DNA, 21 bp, Artificial Sequence
  Description of Artificial Sequence: Synthetic oligonucleotide
atcggaacaacaatgaaagga

SEQ ID NO: 32467 - DNA, 21 bp, Artificial Sequence
  Description of Artificial Sequence: Synthetic oligonucleotide
atcggagtcaaaacactccca

SEQ ID NO: 32468 - DNA, 21 bp, Artificial Sequence
  Description of Artificial Sequence: Synthetic oligonucleotide
atcggagtcctccacctccca

SEQ ID NO: 32469 - DNA, 21 bp, Artificial Sequence
  Description of Artificial Sequence: Synthetic oligonucleotide
atccacgcagcaagcacagac

SEQ ID NO: 32470 - DNA, 21 bp, Artificial Sequence
  Description of Artificial Sequence: Synthetic oligonucleotide
atccacgcaaactggatcgac

SEQ ID NO: 32471 - DNA, 21 bp, Artificial Sequence
  Description of Artificial Sequence: Synthetic oligonucleotide
atccacgacttcacaagcgtc

SEQ ID NO: 32472 - DNA, 21 bp, Artificial Sequence
  Description of Artificial Sequence: Synthetic oligonucleotide
atccacgaactcagcggactc

SEQ ID NO: 32473 - DNA, 21 bp, Artificial Sequence
  Description of Artificial Sequence: Synthetic oligonucleotide
atccacttccaaagcagccaa

SEQ ID NO: 32474 - DNA, 21 bp, Artificial Sequence
  Description of Artificial Sequence: Synthetic oligonucleotide
atccacggaggaagctacaca

SEQ ID NO: 32475 - DNA, 21 bp, Artificial Sequence
  Description of Artificial Sequence: Synthetic oligonucleotide
atccacggaagcacagacaga

SEQ ID NO: 32476 - DNA, 21 bp, Artificial Sequence
  Description of Artificial Sequence: Synthetic oligonucleotide
atccaccacgacccagcaagc

SEQ ID NO: 32477 - DNA, 21 bp, Artificial Sequence
  Description of Artificial Sequence: Synthetic oligonucleotide
atccacctcccaacaagcctc

SEQ ID NO: 32478 - DNA, 21 bp, Artificial Sequence
  Description of Artificial Sequence: Synthetic oligonucleotide
atccacaacagaccactcatg

SEQ ID NO: 32479 - DNA, 21 bp, Artificial Sequence
  Description of Artificial Sequence: Synthetic oligonucleotide
atccacaacacactcgcagca

SEQ ID NO: 32480 - DNA, 21 bp, Artificial Sequence
  Description of Artificial Sequence: Synthetic oligonucleotide
atccacaacgtcgtcgtccaa

SEQ ID NO: 32481 - DNA, 21 bp, Artificial Sequence
  Description of Artificial Sequence: Synthetic oligonucleotide
atccacccaggaagagtcgca

SEQ ID NO: 32482 - DNA, 21 bp, Artificial Sequence
  Description of Artificial Sequence: Synthetic oligonucleotide
atccacccaacaagacaagga

SEQ ID NO: 32483 - DNA, 21 bp, Artificial Sequence
  Description of Artificial Sequence: Synthetic oligonucleotide
atccaccaagcaggacaacca

SEQ ID NO: 32484 - DNA, 21 bp, Artificial Sequence
  Description of Artificial Sequence: Synthetic oligonucleotide
atccaccaaagcagcgaaagc

SEQ ID NO: 32485 - DNA, 21 bp, Artificial Sequence
  Description of Artificial Sequence: Synthetic oligonucleotide
atccacagagtcatcacaagc

SEQ ID NO: 32486 - DNA, 21 bp, Artificial Sequence
  Description of Artificial Sequence: Synthetic oligonucleotide
atccacagcgaaggaagcctc

SEQ ID NO: 32487 - DNA, 21 bp, Artificial Sequence
  Description of Artificial Sequence: Synthetic oligonucleotide
atccacagcctccaacaagaa

SEQ ID NO: 32488 - DNA, 21 bp, Artificial Sequence
  Description of Artificial Sequence: Synthetic oligonucleotide
atccacagcagcatcgacttc

SEQ ID NO: 32489 - DNA, 21 bp, Artificial Sequence
  Description of Artificial Sequence: Synthetic oligonucleotide
atccacagcagcccagcagca

SEQ ID NO: 32490 - DNA, 21 bp, Artificial Sequence
  Description of Artificial Sequence: Synthetic oligonucleotide
atccacagctacgacagaagc

SEQ ID NO: 32491 - DNA, 21 bp, Artificial Sequence
  Description of Artificial Sequence: Synthetic oligonucleotide
atccacacagcagtcgaactc

SEQ ID NO: 32492 - DNA, 21 bp, Artificial Sequence
  Description of Artificial Sequence: Synthetic oligonucleotide
atccacacaggaaactacatg

SEQ ID NO: 32493 - DNA, 21 bp, Artificial Sequence
  Description of Artificial Sequence: Synthetic oligonucleotide
atccacacaaacgcaccacca

SEQ ID NO: 32494 - DNA, 21 bp, Artificial Sequence
  Description of Artificial Sequence: Synthetic oligonucleotide
atccacacaacacaaagaaca

SEQ ID NO: 32495 - DNA, 21 bp, Artificial Sequence
  Description of Artificial Sequence: Synthetic oligonucleotide
atcatcgcagaacacccagca

SEQ ID NO: 32496 - DNA, 21 bp, Artificial Sequence
  Description of Artificial Sequence: Synthetic oligonucleotide
atcatcgcaagactcccacca

SEQ ID NO: 32497 - DNA, 21 bp, Artificial Sequence
  Description of Artificial Sequence: Synthetic oligonucleotide
atcatcgacaaccacatcaga

SEQ ID NO: 32498 - DNA, 21 bp, Artificial Sequence
  Description of Artificial Sequence: Synthetic oligonucleotide
atcatcttccaagacatgcca

SEQ ID NO: 32499 - DNA, 21 bp, Artificial Sequence
  Description of Artificial Sequence: Synthetic oligonucleotide
atcatcggagcaaacgaacca

SEQ ID NO: 32500 - DNA, 21 bp, Artificial Sequence
  Description of Artificial Sequence: Synthetic oligonucleotide
atcatcggaaaaggaacagga

SEQ ID NO: 32501 - DNA, 21 bp, Artificial Sequence
  Description of Artificial Sequence: Synthetic oligonucleotide
atcatccacgacacacacaac

SEQ ID NO: 32502 - DNA, 21 bp, Artificial Sequence
  Description of Artificial Sequence: Synthetic oligonucleotide
atcatccacgaagcaagacca

SEQ ID NO: 32503 - DNA, 21 bp, Artificial Sequence
  Description of Artificial Sequence: Synthetic oligonucleotide
atcatcagagacagccaactc

SEQ ID NO: 32504 - DNA, 21 bp, Artificial Sequence
  Description of Artificial Sequence: Synthetic oligonucleotide
atcatcagcctcacaacaagc

SEQ ID NO: 32505 - DNA, 21 bp, Artificial Sequence
  Description of Artificial Sequence: Synthetic oligonucleotide
atcaaagacgcaggaagccca

SEQ ID NO: 32506 - DNA, 21 bp, Artificial Sequence
  Description of Artificial Sequence: Synthetic oligonucleotide
atcaaagacgcacaaccatgg

SEQ ID NO: 32507 - DNA, 21 bp, Artificial Sequence
  Description of Artificial Sequence: Synthetic oligonucleotide
atcaaagaccaatggaacatg

SEQ ID NO: 32508 - DNA, 21 bp, Artificial Sequence
  Description of Artificial Sequence: Synthetic oligonucleotide
atcaaattcccaacagcagac

SEQ ID NO: 32509 - DNA, 21 bp, Artificial Sequence
  Description of Artificial Sequence: Synthetic oligonucleotide
atcaaaatcgaagacccaaga

SEQ ID NO: 32510 - DNA, 21 bp, Artificial Sequence
  Description of Artificial Sequence: Synthetic oligonucleotide
atcaaaatggcacaaggattc

SEQ ID NO: 32511 - DNA, 21 bp, Artificial Sequence
  Description of Artificial Sequence: Synthetic oligonucleotide
atcaaaaacctcgcaagccac

SEQ ID NO: 32512 - DNA, 21 bp, Artificial Sequence
  Description of Artificial Sequence: Synthetic oligonucleotide
atcaaaccaatcggaggagtc

SEQ ID NO: 32513 - DNA, 21 bp, Artificial Sequence
  Description of Artificial Sequence: Synthetic oligonucleotide
atcaaaccaatgagcggaaca

SEQ ID NO: 32514 - DNA, 21 bp, Artificial Sequence
  Description of Artificial Sequence: Synthetic oligonucleotide
atcaaacaaccactccacaac

SEQ ID NO: 32515 - DNA, 21 bp, Artificial Sequence
  Description of Artificial Sequence: Synthetic oligonucleotide
atcaaaagaacactcagcgac

SEQ ID NO: 32516 - DNA, 21 bp, Artificial Sequence
  Description of Artificial Sequence: Synthetic oligonucleotide
atcaaaagcgacgacggaagc

SEQ ID NO: 32517 - DNA, 21 bp, Artificial Sequence
  Description of Artificial Sequence: Synthetic oligonucleotide
atcaaaagcgaaggaagcctc

SEQ ID NO: 32518 - DNA, 21 bp, Artificial Sequence
  Description of Artificial Sequence: Synthetic oligonucleotide
atcaaaacagaatggagccac

SEQ ID NO: 32519 - DNA, 21 bp, Artificial Sequence
  Description of Artificial Sequence: Synthetic oligonucleotide
atcaaaacattcacaagcagc

SEQ ID NO: 32520 - DNA, 21 bp, Artificial Sequence
  Description of Artificial Sequence: Synthetic oligonucleotide
atcctcgacttcctcccagac

SEQ ID NO: 32521 - DNA, 21 bp, Artificial Sequence
  Description of Artificial Sequence: Synthetic oligonucleotide
atcctcggaggactcgacaga

SEQ ID NO: 32522 - DNA, 21 bp, Artificial Sequence
  Description of Artificial Sequence: Synthetic oligonucleotide
atcctcggaaacacaagagaa

SEQ ID NO: 32523 - DNA, 21 bp, Artificial Sequence
  Description of Artificial Sequence: Synthetic oligonucleotide
atcctcggaagaagcgcagca

SEQ ID NO: 32524 - DNA, 21 bp, Artificial Sequence
  Description of Artificial Sequence: Synthetic oligonucleotide
atcctcggaacaagaccactc

SEQ ID NO: 32525 - DNA, 21 bp, Artificial Sequence
  Description of Artificial Sequence: Synthetic oligonucleotide
atcctcggaacaagcgtccaa

SEQ ID NO: 32526 - DNA, 21 bp, Artificial Sequence
  Description of Artificial Sequence: Synthetic oligonucleotide
atcctccacggaagaggagca

SEQ ID NO: 32527 - DNA, 21 bp, Artificial Sequence
  Description of Artificial Sequence: Synthetic oligonucleotide
atcctccacctcgtcagactc

SEQ ID NO: 32528 - DNA, 21 bp, Artificial Sequence
  Description of Artificial Sequence: Synthetic oligonucleotide
atcctccacagcccaacagtc

SEQ ID NO: 32529 - DNA, 21 bp, Artificial Sequence
  Description of Artificial Sequence: Synthetic oligonucleotide
atcctccacgtcgaaatgaga

SEQ ID NO: 32530 - DNA, 21 bp, Artificial Sequence
  Description of Artificial Sequence: Synthetic oligonucleotide
atcctcaaacacatcggactc

SEQ ID NO: 32531 - DNA, 21 bp, Artificial Sequence
  Description of Artificial Sequence: Synthetic oligonucleotide
atcctcaaacaacaagcaaac

SEQ ID NO: 32532 - DNA, 21 bp, Artificial Sequence
  Description of Artificial Sequence: Synthetic oligonucleotide
atcctcctcgacgacgaaagc

SEQ ID NO: 32533 - DNA, 21 bp, Artificial Sequence
  Description of Artificial Sequence: Synthetic oligonucleotide
atcctcctccacccaagagga

SEQ ID NO: 32534 - DNA, 21 bp, Artificial Sequence
  Description of Artificial Sequence: Synthetic oligonucleotide
atcctcctcatgggaacaagc

SEQ ID NO: 32535 - DNA, 21 bp, Artificial Sequence
  Description of Artificial Sequence: Synthetic oligonucleotide
atcctcctcagaaaagaccca

SEQ ID NO: 32536 - DNA, 21 bp, Artificial Sequence
  Description of Artificial Sequence: Synthetic oligonucleotide
atcctcctcagcgaaggacac

SEQ ID NO: 32537 - DNA, 21 bp, Artificial Sequence
  Description of Artificial Sequence: Synthetic oligonucleotide
atcctcctcagcatcagagac

SEQ ID NO: 32538 - DNA, 21 bp, Artificial Sequence
  Description of Artificial Sequence: Synthetic oligonucleotide
atcctcatgagcgcacaaagc

SEQ ID NO: 32539 - DNA, 21 bp, Artificial Sequence
  Description of Artificial Sequence: Synthetic oligonucleotide
atcctcatggtcgacgacaca

SEQ ID NO: 32540 - DNA, 21 bp, Artificial Sequence
  Description of Artificial Sequence: Synthetic oligonucleotide
atcctcaacgacagaagcgca

SEQ ID NO: 32541 - DNA, 21 bp, Artificial Sequence
  Description of Artificial Sequence: Synthetic oligonucleotide
atcctcaaccacggaaaagga

SEQ ID NO: 32542 - DNA, 21 bp, Artificial Sequence
  Description of Artificial Sequence: Synthetic oligonucleotide
atcctcaacaaaccactcagc

SEQ ID NO: 32543 - DNA, 21 bp, Artificial Sequence
  Description of Artificial Sequence: Synthetic oligonucleotide
atcctcccacacacaacaaca

SEQ ID NO: 32544 - DNA, 21 bp, Artificial Sequence
  Description of Artificial Sequence: Synthetic oligonucleotide
atcctcccaaacagcatgcca

SEQ ID NO: 32545 - DNA, 21 bp, Artificial Sequence
  Description of Artificial Sequence: Synthetic oligonucleotide
atcctcccaaacacaggacca

SEQ ID NO: 32546 - DNA, 21 bp, Artificial Sequence
  Description of Artificial Sequence: Synthetic oligonucleotide
atcctcccaccaatcacagac

SEQ ID NO: 32547 - DNA, 21 bp, Artificial Sequence
  Description of Artificial Sequence: Synthetic oligonucleotide
atcctcccaagcctcacagca

SEQ ID NO: 32548 - DNA, 21 bp, Artificial Sequence
  Description of Artificial Sequence: Synthetic oligonucleotide
atcctcccaagcagcttcagc

SEQ ID NO: 32549 - DNA, 21 bp, Artificial Sequence
  Description of Artificial Sequence: Synthetic oligonucleotide
atcctcccatacagcagccca

SEQ ID NO: 32550 - DNA, 21 bp, Artificial Sequence
  Description of Artificial Sequence: Synthetic oligonucleotide
atcctccaagcacaccaaaca

SEQ ID NO: 32551 - DNA, 21 bp, Artificial Sequence
  Description of Artificial Sequence: Synthetic oligonucleotide
atcctccaaagcgaattcaca

SEQ ID NO: 32552 - DNA, 21 bp, Artificial Sequence
  Description of Artificial Sequence: Synthetic oligonucleotide
atcctcagaggagacggacca

SEQ ID NO: 32553 - DNA, 21 bp, Artificial Sequence
  Description of Artificial Sequence: Synthetic oligonucleotide
atcctcagaggaaacggaagc

SEQ ID NO: 32554 - DNA, 21 bp, Artificial Sequence
  Description of Artificial Sequence: Synthetic oligonucleotide
atcctcagaacagaatacaaa

SEQ ID NO: 32555 - DNA, 21 bp, Artificial Sequence
  Description of Artificial Sequence: Synthetic oligonucleotide
atcctcagagtccacacacca

SEQ ID NO: 32556 - DNA, 21 bp, Artificial Sequence
  Description of Artificial Sequence: Synthetic oligonucleotide
atcctcagcgaaagaacacca

SEQ ID NO: 32557 - DNA, 21 bp, Artificial Sequence
  Description of Artificial Sequence: Synthetic oligonucleotide
atcctcagcatggacacagca

SEQ ID NO: 32558 - DNA, 21 bp, Artificial Sequence
  Description of Artificial Sequence: Synthetic oligonucleotide
atcctcacaggaagccacgca

SEQ ID NO: 32559 - DNA, 21 bp, Artificial Sequence
  Description of Artificial Sequence: Synthetic oligonucleotide
atcctcacaaaagacgtcagc

SEQ ID NO: 32560 - DNA, 21 bp, Artificial Sequence
  Description of Artificial Sequence: Synthetic oligonucleotide
atcctcacaaaaagcccaaca

SEQ ID NO: 32561 - DNA, 21 bp, Artificial Sequence
  Description of Artificial Sequence: Synthetic oligonucleotide
atcctcacaagagtcagccca

SEQ ID NO: 32562 - DNA, 21 bp, Artificial Sequence
  Description of Artificial Sequence: Synthetic oligonucleotide
atcctcacaagcgtcacaaaa

SEQ ID NO: 32563 - DNA, 21 bp, Artificial Sequence
  Description of Artificial Sequence: Synthetic oligonucleotide
atcctcgtcagcgaactcaga

SEQ ID NO: 32564 - DNA, 21 bp, Artificial Sequence
  Description of Artificial Sequence: Synthetic oligonucleotide
atcatggcaccaacaacacaa

SEQ ID NO: 32565 - DNA, 21 bp, Artificial Sequence
  Description of Artificial Sequence: Synthetic oligonucleotide
atcatggacgcacacatcgca

SEQ ID NO: 32566 - DNA, 21 bp, Artificial Sequence
  Description of Artificial Sequence: Synthetic oligonucleotide
atcatggacgtcaaattccac

SEQ ID NO: 32567 - DNA, 21 bp, Artificial Sequence
  Description of Artificial Sequence: Synthetic oligonucleotide
atcatggaagtcagaggacca

SEQ ID NO: 32568 - DNA, 21 bp, Artificial Sequence
  Description of Artificial Sequence: Synthetic oligonucleotide
atcatgggagaaccaagaaaa

SEQ ID NO: 32569 - DNA, 21 bp, Artificial Sequence
  Description of Artificial Sequence: Synthetic oligonucleotide
atcatgggaagcgcaccaagc

SEQ ID NO: 32570 - DNA, 21 bp, Artificial Sequence
  Description of Artificial Sequence: Synthetic oligonucleotide
atcatgggaagcgcaccatac

SEQ ID NO: 32571 - DNA, 21 bp, Artificial Sequence
  Description of Artificial Sequence: Synthetic oligonucleotide
atcatgctcccagacgcagac

SEQ ID NO: 32572 - DNA, 21 bp, Artificial Sequence
  Description of Artificial Sequence: Synthetic oligonucleotide
atcatgaacgcaaacagagca

SEQ ID NO: 32573 - DNA, 21 bp, Artificial Sequence
  Description of Artificial Sequence: Synthetic oligonucleotide
atcatgaacagaatcagcgca

SEQ ID NO: 32574 - DNA, 21 bp, Artificial Sequence
  Description of Artificial Sequence: Synthetic oligonucleotide
atcatgccaaacagcagcgac

SEQ ID NO: 32575 - DNA, 21 bp, Artificial Sequence
  Description of Artificial Sequence: Synthetic oligonucleotide
atcatgccaagcagcacaaac

SEQ ID NO: 32576 - DNA, 21 bp, Artificial Sequence
  Description of Artificial Sequence: Synthetic oligonucleotide
atcatgagaccaagcgaccca

SEQ ID NO: 32577 - DNA, 21 bp, Artificial Sequence
  Description of Artificial Sequence: Synthetic oligonucleotide
atcatgagcacaacaacactc

SEQ ID NO: 32578 - DNA, 21 bp, Artificial Sequence
  Description of Artificial Sequence: Synthetic oligonucleotide
atcatgacaatgacaccaagc

SEQ ID NO: 32579 - DNA, 21 bp, Artificial Sequence
  Description of Artificial Sequence: Synthetic oligonucleotide
atcaacgcacaaacacacctc

SEQ ID NO: 32580 - DNA, 21 bp, Artificial Sequence
  Description of Artificial Sequence: Synthetic oligonucleotide
atcaacgcataccacgtccca

SEQ ID NO: 32581 - DNA, 21 bp, Artificial Sequence
  Description of Artificial Sequence: Synthetic oligonucleotide
atcaacgaacacgtcagactc

SEQ ID NO: 32582 - DNA, 21 bp, Artificial Sequence
  Description of Artificial Sequence: Synthetic oligonucleotide
atcaacgaaagcaacagagga

SEQ ID NO: 32583 - DNA, 21 bp, Artificial Sequence
  Description of Artificial Sequence: Synthetic oligonucleotide
atcaacggaagcgacagacaa

SEQ ID NO: 32584 - DNA, 21 bp, Artificial Sequence
  Description of Artificial Sequence: Synthetic oligonucleotide
atcaacggaacagcaaaacac

SEQ ID NO: 32585 - DNA, 21 bp, Artificial Sequence
  Description of Artificial Sequence: Synthetic oligonucleotide
atcaaccacagcagcatggga

SEQ ID NO: 32586 - DNA, 21 bp, Artificial Sequence
  Description of Artificial Sequence: Synthetic oligonucleotide
atcaacatcgcaagcgcagga

SEQ ID NO: 32587 - DNA, 21 bp, Artificial Sequence
  Description of Artificial Sequence: Synthetic oligonucleotide
atcaacaaaccaagcaacgga

SEQ ID NO: 32588 - DNA, 21 bp, Artificial Sequence
  Description of Artificial Sequence: Synthetic oligonucleotide
atcaacctccacgtcaaaagc

SEQ ID NO: 32589 - DNA, 21 bp, Artificial Sequence
  Description of Artificial Sequence: Synthetic oligonucleotide
atcaacctcagaccagcagca

SEQ ID NO: 32590 - DNA, 21 bp, Artificial Sequence
  Description of Artificial Sequence: Synthetic oligonucleotide
atcaacctcacaccaagattc

SEQ ID NO: 32591 - DNA, 21 bp, Artificial Sequence
  Description of Artificial Sequence: Synthetic oligonucleotide
atcaacatggcaggagtccac

SEQ ID NO: 32592 - DNA, 21 bp, Artificial Sequence
  Description of Artificial Sequence: Synthetic oligonucleotide
atcaacatgagcacaggaagc

SEQ ID NO: 32593 - DNA, 21 bp, Artificial Sequence
  Description of Artificial Sequence: Synthetic oligonucleotide
atcaacccacaaaacagaaca

SEQ ID NO: 32594 - DNA, 21 bp, Artificial Sequence
  Description of Artificial Sequence: Synthetic oligonucleotide
atcaacagaggagtcaacagc

SEQ ID NO: 32595 - DNA, 21 bp, Artificial Sequence
  Description of Artificial Sequence: Synthetic oligonucleotide
atcaacagaacaacaatggaa

SEQ ID NO: 32596 - DNA, 21 bp, Artificial Sequence
  Description of Artificial Sequence: Synthetic oligonucleotide
atcaacagagtcacagcagaa

SEQ ID NO: 32597 - DNA, 21 bp, Artificial Sequence
  Description of Artificial Sequence: Synthetic oligonucleotide
atcaacagcgcagcagtcctc

SEQ ID NO: 32598 - DNA, 21 bp, Artificial Sequence
  Description of Artificial Sequence: Synthetic oligonucleotide
atcaacagcggaagaagcaac

SEQ ID NO: 32599 - DNA, 21 bp, Artificial Sequence
  Description of Artificial Sequence: Synthetic oligonucleotide
atcaacagccacacactccaa

SEQ ID NO: 32600 - DNA, 21 bp, Artificial Sequence
  Description of Artificial Sequence: Synthetic oligonucleotide
atcaacagccaaaaaccacca

SEQ ID NO: 32601 - DNA, 21 bp, Artificial Sequence
  Description of Artificial Sequence: Synthetic oligonucleotide
atcaacagcagaaacggagtc

SEQ ID NO: 32602 - DNA, 21 bp, Artificial Sequence
  Description of Artificial Sequence: Synthetic oligonucleotide
atcaacacactcggaaacagc

SEQ ID NO: 32603 - DNA, 21 bp, Artificial Sequence
  Description of Artificial Sequence: Synthetic oligonucleotide
atcaacacaccaggatacaca

SEQ ID NO: 32604 - DNA, 21 bp, Artificial Sequence
  Description of Artificial Sequence: Synthetic oligonucleotide
atcaacgtcctcagaagcgca

SEQ ID NO: 32605 - DNA, 21 bp, Artificial Sequence
  Description of Artificial Sequence: Synthetic oligonucleotide
atcccagcaaacagccaagtc

SEQ ID NO: 32606 - DNA, 21 bp, Artificial Sequence
  Description of Artificial Sequence: Synthetic oligonucleotide
atcccagcaagcagcagctgg

SEQ ID NO: 32607 - DNA, 21 bp, Artificial Sequence
  Description of Artificial Sequence: Synthetic oligonucleotide
atcccagacctcaaaagaaca

SEQ ID NO: 32608 - DNA, 21 bp, Artificial Sequence
  Description of Artificial Sequence: Synthetic oligonucleotide
atcccagaaggactcccactc

SEQ ID NO: 32609 - DNA, 21 bp, Artificial Sequence
  Description of Artificial Sequence: Synthetic oligonucleotide
atcccaggattcccaaaaagc

SEQ ID NO: 32610 - DNA, 21 bp, Artificial Sequence
  Description of Artificial Sequence: Synthetic oligonucleotide
atcccaggaacagaactccaa

SEQ ID NO: 32611 - DNA, 21 bp, Artificial Sequence
  Description of Artificial Sequence: Synthetic oligonucleotide
atcccacacaaccaagcatac

SEQ ID NO: 32612 - DNA, 21 bp, Artificial Sequence
  Description of Artificial Sequence: Synthetic oligonucleotide
atcccacacccagcaaacagc

SEQ ID NO: 32613 - DNA, 21 bp, Artificial Sequence
  Description of Artificial Sequence: Synthetic oligonucleotide
atcccacacacacaaacacaa

SEQ ID NO: 32614 - DNA, 21 bp, Artificial Sequence
  Description of Artificial Sequence: Synthetic oligonucleotide
atcccaatcggatacaaaaca

SEQ ID NO: 32615 - DNA, 21 bp, Artificial Sequence
  Description of Artificial Sequence: Synthetic oligonucleotide
atcccaatcaaaaacggaatg

SEQ ID NO: 32616 - DNA, 21 bp, Artificial Sequence
  Description of Artificial Sequence: Synthetic oligonucleotide
atcccaatcccagtcgcaatg

SEQ ID NO: 32617 - DNA, 21 bp, Artificial Sequence
  Description of Artificial Sequence: Synthetic oligonucleotide
atcccaaaaacaagaccagaa

SEQ ID NO: 32618 - DNA, 21 bp, Artificial Sequence
  Description of Artificial Sequence: Synthetic oligonucleotide
atcccactcaaagcatacgga

SEQ ID NO: 32619 - DNA, 21 bp, Artificial Sequence
  Description of Artificial Sequence: Synthetic oligonucleotide
atcccactcccaaacgacgga

SEQ ID NO: 32620 - DNA, 21 bp, Artificial Sequence
  Description of Artificial Sequence: Synthetic oligonucleotide
atcccactcacaagccacaca

SEQ ID NO: 32621 - DNA, 21 bp, Artificial Sequence
  Description of Artificial Sequence: Synthetic oligonucleotide
atcccaatgagcgcagcaaaa

SEQ ID NO: 32622 - DNA, 21 bp, Artificial Sequence
  Description of Artificial Sequence: Synthetic oligonucleotide
atcccaaacttcgtccacagc

SEQ ID NO: 32623 - DNA, 21 bp, Artificial Sequence
  Description of Artificial Sequence: Synthetic oligonucleotide
atcccaaaccacaaaagcatc

SEQ ID NO: 32624 - DNA, 21 bp, Artificial Sequence
  Description of Artificial Sequence: Synthetic oligonucleotide
atcccaaacaaaacaccattc

SEQ ID NO: 32625 - DNA, 21 bp, Artificial Sequence
  Description of Artificial Sequence: Synthetic oligonucleotide
atcccaaacctcaaaatcagc

SEQ ID NO: 32626 - DNA, 21 bp, Artificial Sequence
  Description of Artificial Sequence: Synthetic oligonucleotide
atcccaaacccaccaatggca

SEQ ID NO: 32627 - DNA, 21 bp, Artificial Sequence
  Description of Artificial Sequence: Synthetic oligonucleotide
atcccaaacagacacctcagc

SEQ ID NO: 32628 - DNA, 21 bp, Artificial Sequence
  Description of Artificial Sequence: Synthetic oligonucleotide
atcccaaacgtcagccaccaa

SEQ ID NO: 32629 - DNA, 21 bp, Artificial Sequence
  Description of Artificial Sequence: Synthetic oligonucleotide
atcccaaactacgcagtcagc

SEQ ID NO: 32630 - DNA, 21 bp, Artificial Sequence
  Description of Artificial Sequence: Synthetic oligonucleotide
atcccaccaagaagcaacagc

SEQ ID NO: 32631 - DNA, 21 bp, Artificial Sequence
  Description of Artificial Sequence: Synthetic oligonucleotide
atcccacaagcaagcctcatg

SEQ ID NO: 32632 - DNA, 21 bp, Artificial Sequence
  Description of Artificial Sequence: Synthetic oligonucleotide
atcccacaaaacagaatcctc

SEQ ID NO: 32633 - DNA, 21 bp, Artificial Sequence
  Description of Artificial Sequence: Synthetic oligonucleotide
atcccacaaccagtccacctc

SEQ ID NO: 32634 - DNA, 21 bp, Artificial Sequence
  Description of Artificial Sequence: Synthetic oligonucleotide
atcccaagagcagacgcaaga

SEQ ID NO: 32635 - DNA, 21 bp, Artificial Sequence
  Description of Artificial Sequence: Synthetic oligonucleotide
atcccaagattcagcacaatg

SEQ ID NO: 32636 - DNA, 21 bp, Artificial Sequence
  Description of Artificial Sequence: Synthetic oligonucleotide
atcccaagaccaagcgtccac

SEQ ID NO: 32637 - DNA, 21 bp, Artificial Sequence
  Description of Artificial Sequence: Synthetic oligonucleotide
atcccaagaagcaacatcagc

SEQ ID NO: 32638 - DNA, 21 bp, Artificial Sequence
  Description of Artificial Sequence: Synthetic oligonucleotide
atcccaagaacagcactccaa

SEQ ID NO: 32639 - DNA, 21 bp, Artificial Sequence
  Description of Artificial Sequence: Synthetic oligonucleotide
atcccaagcttcaaaagagaa

SEQ ID NO: 32640 - DNA, 21 bp, Artificial Sequence
  Description of Artificial Sequence: Synthetic oligonucleotide
atcccaagcttcagcaaacca

SEQ ID NO: 32641 - DNA, 21 bp, Artificial Sequence
  Description of Artificial Sequence: Synthetic oligonucleotide
atcccaagcaactgcaaacca

SEQ ID NO: 32642 - DNA, 21 bp, Artificial Sequence
  Description of Artificial Sequence: Synthetic oligonucleotide
atcccaagcccaagccacgaa

SEQ ID NO: 32643 - DNA, 21 bp, Artificial Sequence
  Description of Artificial Sequence: Synthetic oligonucleotide
atcccaagcagatacgcaatg

SEQ ID NO: 32644 - DNA, 21 bp, Artificial Sequence
  Description of Artificial Sequence: Synthetic oligonucleotide
atcccaagcgtcccagtcagc

SEQ ID NO: 32645 - DNA, 21 bp, Artificial Sequence
  Description of Artificial Sequence: Synthetic oligonucleotide
atcccaacaatcagccacgga

SEQ ID NO: 32646 - DNA, 21 bp, Artificial Sequence
  Description of Artificial Sequence: Synthetic oligonucleotide
atcccaacactcccagcaatg

SEQ ID NO: 32647 - DNA, 21 bp, Artificial Sequence
  Description of Artificial Sequence: Synthetic oligonucleotide
atcccaacaccaaacaacgtc

SEQ ID NO: 32648 - DNA, 21 bp, Artificial Sequence
  Description of Artificial Sequence: Synthetic oligonucleotide
atcccaacaacagcactcgga

SEQ ID NO: 32649 - DNA, 21 bp, Artificial Sequence
  Description of Artificial Sequence: Synthetic oligonucleotide
atcccagtcttcagaagcgaa

SEQ ID NO: 32650 - DNA, 21 bp, Artificial Sequence
  Description of Artificial Sequence: Synthetic oligonucleotide
atcccagtcggacaatacaac

SEQ ID NO: 32651 - DNA, 21 bp, Artificial Sequence
  Description of Artificial Sequence: Synthetic oligonucleotide
atcccagtcagactcacacaa

SEQ ID NO: 32652 - DNA, 21 bp, Artificial Sequence
  Description of Artificial Sequence: Synthetic oligonucleotide
atcccatacatgctcgaccca

SEQ ID NO: 32653 - DNA, 21 bp, Artificial Sequence
  Description of Artificial Sequence: Synthetic oligonucleotide
atccaagcagtcagcagcctc

SEQ ID NO: 32654 - DNA, 21 bp, Artificial Sequence
  Description of Artificial Sequence: Synthetic oligonucleotide
atccaagacgaaacagtcagc

SEQ ID NO: 32655 - DNA, 21 bp, Artificial Sequence
  Description of Artificial Sequence: Synthetic oligonucleotide
atccaagaaagcgcaagaatg

SEQ ID NO: 32656 - DNA, 21 bp, Artificial Sequence
  Description of Artificial Sequence: Synthetic oligonucleotide
atccaattcagaagcgcaaca

SEQ ID NO: 32657 - DNA, 21 bp, Artificial Sequence
  Description of Artificial Sequence: Synthetic oligonucleotide
atccaattcgtcccagtcgac

SEQ ID NO: 32658 - DNA, 21 bp, Artificial Sequence
  Description of Artificial Sequence: Synthetic oligonucleotide
atccaaggactcagcgcactc

SEQ ID NO: 32659 - DNA, 21 bp, Artificial Sequence
  Description of Artificial Sequence: Synthetic oligonucleotide
atccaaggaagactcacaaca

SEQ ID NO: 32660 - DNA, 21 bp, Artificial Sequence
  Description of Artificial Sequence: Synthetic oligonucleotide
atccaacaccaaccactcaca

SEQ ID NO: 32661 - DNA, 21 bp, Artificial Sequence
  Description of Artificial Sequence: Synthetic oligonucleotide
atccaaatcaaaagcctcaac

SEQ ID NO: 32662 - DNA, 21 bp, Artificial Sequence
  Description of Artificial Sequence: Synthetic oligonucleotide
atccaaatccaagaaagaaga

SEQ ID NO: 32663 - DNA, 21 bp, Artificial Sequence
  Description of Artificial Sequence: Synthetic oligonucleotide
atccaactcaaaagcacagtc

SEQ ID NO: 32664 - DNA, 21 bp, Artificial Sequence
  Description of Artificial Sequence: Synthetic oligonucleotide
atccaactcagaatcaacgca

SEQ ID NO: 32665 - DNA, 21 bp, Artificial Sequence
  Description of Artificial Sequence: Synthetic oligonucleotide
atccaactcagcgcagcaagc

SEQ ID NO: 32666 - DNA, 21 bp, Artificial Sequence
  Description of Artificial Sequence: Synthetic oligonucleotide
atccaaaacggataccaattc

SEQ ID NO: 32667 - DNA, 21 bp, Artificial Sequence
  Description of Artificial Sequence: Synthetic oligonucleotide
atccaaaaccaccaccaactc

SEQ ID NO: 32668 - DNA, 21 bp, Artificial Sequence
  Description of Artificial Sequence: Synthetic oligonucleotide
atccaaaacacaccaccaaca

SEQ ID NO: 32669 - DNA, 21 bp, Artificial Sequence
  Description of Artificial Sequence: Synthetic oligonucleotide
atccaaaacgtcccactccac

SEQ ID NO: 32670 - DNA, 21 bp, Artificial Sequence
  Description of Artificial Sequence: Synthetic oligonucleotide
atccaaagaccaagcgacatc

SEQ ID NO: 32671 - DNA, 21 bp, Artificial Sequence
  Description of Artificial Sequence: Synthetic oligonucleotide
atccaaagaagcgtcgaagca

SEQ ID NO: 32672 - DNA, 21 bp, Artificial Sequence
  Description of Artificial Sequence: Synthetic oligonucleotide
atccaaagagtcgcacaagga

SEQ ID NO: 32673 - DNA, 21 bp, Artificial Sequence
  Description of Artificial Sequence: Synthetic oligonucleotide
atccaaagcatcaacctccca

SEQ ID NO: 32674 - DNA, 21 bp, Artificial Sequence
  Description of Artificial Sequence: Synthetic oligonucleotide
atccaaagcccactcctcgca

SEQ ID NO: 32675 - DNA, 21 bp, Artificial Sequence
  Description of Artificial Sequence: Synthetic oligonucleotide
atccaaagcacaagactcgtc

SEQ ID NO: 32676 - DNA, 21 bp, Artificial Sequence
  Description of Artificial Sequence: Synthetic oligonucleotide
atccaaagctacaacacactc

SEQ ID NO: 32677 - DNA, 21 bp, Artificial Sequence
  Description of Artificial Sequence: Synthetic oligonucleotide
atccaaacaagaagcgacatg

SEQ ID NO: 32678 - DNA, 21 bp, Artificial Sequence
  Description of Artificial Sequence: Synthetic oligonucleotide
atccaaacagtcagcgcagtc

SEQ ID NO: 32679 - DNA, 21 bp, Artificial Sequence
  Description of Artificial Sequence: Synthetic oligonucleotide
atcagagcactcgcaggacac

SEQ ID NO: 32680 - DNA, 21 bp, Artificial Sequence
  Description of Artificial Sequence: Synthetic oligonucleotide
atcagagcaagccaaacaatc

SEQ ID NO: 32681 - DNA, 21 bp, Artificial Sequence
  Description of Artificial Sequence: Synthetic oligonucleotide
atcagagcaacaagcagcgaa

SEQ ID NO: 32682 - DNA, 21 bp, Artificial Sequence
  Description of Artificial Sequence: Synthetic oligonucleotide
atcagagacgtccacgtcgtc

SEQ ID NO: 32683 - DNA, 21 bp, Artificial Sequence
  Description of Artificial Sequence: Synthetic oligonucleotide
atcagagaaccaacagcaatg

SEQ ID NO: 32684 - DNA, 21 bp, Artificial Sequence
  Description of Artificial Sequence: Synthetic oligonucleotide
atcagaggagcactcggaatc

SEQ ID NO: 32685 - DNA, 21 bp, Artificial Sequence
  Description of Artificial Sequence: Synthetic oligonucleotide
atcagaggaaacttcctcagc

SEQ ID NO: 32686 - DNA, 21 bp, Artificial Sequence
  Description of Artificial Sequence: Synthetic oligonucleotide
atcagaggaacaccagcattc

SEQ ID NO: 32687 - DNA, 21 bp, Artificial Sequence
  Description of Artificial Sequence: Synthetic oligonucleotide
atcagacacggaatcgcagca

SEQ ID NO: 32688 - DNA, 21 bp, Artificial Sequence
  Description of Artificial Sequence: Synthetic oligonucleotide
atcagaatcccagaactccca

SEQ ID NO: 32689 - DNA, 21 bp, Artificial Sequence
  Description of Artificial Sequence: Synthetic oligonucleotide
atcagaatcccaatgacacca

SEQ ID NO: 32690 - DNA, 21 bp, Artificial Sequence
  Description of Artificial Sequence: Synthetic oligonucleotide
atcagaaaaagcccaaacgaa

SEQ ID NO: 32691 - DNA, 21 bp, Artificial Sequence
  Description of Artificial Sequence: Synthetic oligonucleotide
atcagactcgaatacagcgca

SEQ ID NO: 32692 - DNA, 21 bp, Artificial Sequence
  Description of Artificial Sequence: Synthetic oligonucleotide
atcagactcggaagcttcgca

SEQ ID NO: 32693 - DNA, 21 bp, Artificial Sequence
  Description of Artificial Sequence: Synthetic oligonucleotide
atcagactccaaaacagcatc

SEQ ID NO: 32694 - DNA, 21 bp, Artificial Sequence
  Description of Artificial Sequence: Synthetic oligonucleotide
atcagactcagcgacaaagca

SEQ ID NO: 32695 - DNA, 21 bp, Artificial Sequence
  Description of Artificial Sequence: Synthetic oligonucleotide
atcagaatgagcacacaactc

SEQ ID NO: 32696 - DNA, 21 bp, Artificial Sequence
  Description of Artificial Sequence: Synthetic oligonucleotide
atcagaaacggaagcgacgac

SEQ ID NO: 32697 - DNA, 21 bp, Artificial Sequence
  Description of Artificial Sequence: Synthetic oligonucleotide
atcagaaacatcatcgacttc

SEQ ID NO: 32698 - DNA, 21 bp, Artificial Sequence
  Description of Artificial Sequence: Synthetic oligonucleotide
atcagaccactcaacatgcca

SEQ ID NO: 32699 - DNA, 21 bp, Artificial Sequence
  Description of Artificial Sequence: Synthetic oligonucleotide
atcagaccaacagaaggaatg

SEQ ID NO: 32700 - DNA, 21 bp, Artificial Sequence
  Description of Artificial Sequence: Synthetic oligonucleotide
atcagacaagaatgcagaatc

SEQ ID NO: 32701 - DNA, 21 bp, Artificial Sequence
  Description of Artificial Sequence: Synthetic oligonucleotide
atcagacaaatcccatacgca

SEQ ID NO: 32702 - DNA, 21 bp, Artificial Sequence
  Description of Artificial Sequence: Synthetic oligonucleotide
atcagacaaagcagcgtcaac

SEQ ID NO: 32703 - DNA, 21 bp, Artificial Sequence
  Description of Artificial Sequence: Synthetic oligonucleotide
atcagaagcggacaaccactc

SEQ ID NO: 32704 - DNA, 21 bp, Artificial Sequence
  Description of Artificial Sequence: Synthetic oligonucleotide
atcagaagcatcacagacaca

SEQ ID NO: 32705 - DNA, 21 bp, Artificial Sequence
  Description of Artificial Sequence: Synthetic oligonucleotide
atcagaagcctcgcaacagca

SEQ ID NO: 32706 - DNA, 21 bp, Artificial Sequence
  Description of Artificial Sequence: Synthetic oligonucleotide
atcagaagcccactcccaagc

SEQ ID NO: 32707 - DNA, 21 bp, Artificial Sequence
  Description of Artificial Sequence: Synthetic oligonucleotide
atcagaagcagcggaatgatg

SEQ ID NO: 32708 - DNA, 21 bp, Artificial Sequence
  Description of Artificial Sequence: Synthetic oligonucleotide
atcagaagcagcccaccaaca

SEQ ID NO: 32709 - DNA, 21 bp, Artificial Sequence
  Description of Artificial Sequence: Synthetic oligonucleotide
atcagaagcgtcagcgaagtc

SEQ ID NO: 32710 - DNA, 21 bp, Artificial Sequence
  Description of Artificial Sequence: Synthetic oligonucleotide
atcagaacactcggaagcaca

SEQ ID NO: 32711 - DNA, 21 bp, Artificial Sequence
  Description of Artificial Sequence: Synthetic oligonucleotide
atcagaacaacagcagcattc

SEQ ID NO: 32712 - DNA, 21 bp, Artificial Sequence
  Description of Artificial Sequence: Synthetic oligonucleotide
atcagagtcgaaaacgaactc

SEQ ID NO: 32713 - DNA, 21 bp, Artificial Sequence
  Description of Artificial Sequence: Synthetic oligonucleotide
atcagagtcaacgacacagga

SEQ ID NO: 32714 - DNA, 21 bp, Artificial Sequence
  Description of Artificial Sequence: Synthetic oligonucleotide
atcagagtcccaacaagcagc

SEQ ID NO: 32715 - DNA, 21 bp, Artificial Sequence
  Description of Artificial Sequence: Synthetic oligonucleotide
atcagagtcagcgcaatccac

SEQ ID NO: 32716 - DNA, 21 bp, Artificial Sequence
  Description of Artificial Sequence: Synthetic oligonucleotide
atcagcgcagcaagcagagca

SEQ ID NO: 32717 - DNA, 21 bp, Artificial Sequence
  Description of Artificial Sequence: Synthetic oligonucleotide
atcagcgcagcagtcatggca

SEQ ID NO: 32718 - DNA, 21 bp, Artificial Sequence
  Description of Artificial Sequence: Synthetic oligonucleotide
atcagcgcaggaccaatgcca

SEQ ID NO: 32719 - DNA, 21 bp, Artificial Sequence
  Description of Artificial Sequence: Synthetic oligonucleotide
atcagcgcaatcagcgcacaa

SEQ ID NO: 32720 - DNA, 21 bp, Artificial Sequence
  Description of Artificial Sequence: Synthetic oligonucleotide
atcagcgcaaacatgttcagc

SEQ ID NO: 32721 - DNA, 21 bp, Artificial Sequence
  Description of Artificial Sequence: Synthetic oligonucleotide
atcagcgcaagaccaacaatc

SEQ ID NO: 32722 - DNA, 21 bp, Artificial Sequence
  Description of Artificial Sequence: Synthetic oligonucleotide
atcagcgcaagccacagcagc

SEQ ID NO: 32723 - DNA, 21 bp, Artificial Sequence
  Description of Artificial Sequence: Synthetic oligonucleotide
atcagcgcaacaacaagcagc

SEQ ID NO: 32724 - DNA, 21 bp, Artificial Sequence
  Description of Artificial Sequence: Synthetic oligonucleotide
atcagcgaccaacaatacaca

SEQ ID NO: 32725 - DNA, 21 bp, Artificial Sequence
  Description of Artificial Sequence: Synthetic oligonucleotide
atcagcgaatgcgtcggagga

SEQ ID NO: 32726 - DNA, 21 bp, Artificial Sequence
  Description of Artificial Sequence: Synthetic oligonucleotide
atcagcgaacacatcatgagc

SEQ ID NO: 32727 - DNA, 21 bp, Artificial Sequence
  Description of Artificial Sequence: Synthetic oligonucleotide
atcagcgaaccaacaagcgtc

SEQ ID NO: 32728 - DNA, 21 bp, Artificial Sequence
  Description of Artificial Sequence: Synthetic oligonucleotide
atcagcgaaagcagcagatac

SEQ ID NO: 32729 - DNA, 21 bp, Artificial Sequence
  Description of Artificial Sequence: Synthetic oligonucleotide
atcagcttcagaatcgaaaac

SEQ ID NO: 32730 - DNA, 21 bp, Artificial Sequence
  Description of Artificial Sequence: Synthetic oligonucleotide
atcagcggagcagtcgacaga

SEQ ID NO: 32731 - DNA, 21 bp, Artificial Sequence
  Description of Artificial Sequence: Synthetic oligonucleotide
atcagcggaaaactcgcaaca

SEQ ID NO: 32732 - DNA, 21 bp, Artificial Sequence
  Description of Artificial Sequence: Synthetic oligonucleotide
atcagcggaaacccaaacgca

SEQ ID NO: 32733 - DNA, 21 bp, Artificial Sequence
  Description of Artificial Sequence: Synthetic oligonucleotide
atcagcggaccaccaacacca

SEQ ID NO: 32734 - DNA, 21 bp, Artificial Sequence
  Description of Artificial Sequence: Synthetic oligonucleotide
atcagcggaagaaacgcaaca

SEQ ID NO: 32735 - DNA, 21 bp, Artificial Sequence
  Description of Artificial Sequence: Synthetic oligonucleotide
atcagccacagcgacaacgca

SEQ ID NO: 32736 - DNA, 21 bp, Artificial Sequence
  Description of Artificial Sequence: Synthetic oligonucleotide
atcagcatccaactcagagac

SEQ ID NO: 32737 - DNA, 21 bp, Artificial Sequence
  Description of Artificial Sequence: Synthetic oligonucleotide
atcagcatcagaacaggacca

SEQ ID NO: 32738 - DNA, 21 bp, Artificial Sequence
  Description of Artificial Sequence: Synthetic oligonucleotide
atcagcaaagcagaagcaatc

SEQ ID NO: 32739 - DNA, 21 bp, Artificial Sequence
  Description of Artificial Sequence: Synthetic oligonucleotide
atcagcaaagcatacccaaac

SEQ ID NO: 32740 - DNA, 21 bp, Artificial Sequence
  Description of Artificial Sequence: Synthetic oligonucleotide
atcagcaaagacggagcagtc

SEQ ID NO: 32741 - DNA, 21 bp, Artificial Sequence
  Description of Artificial Sequence: Synthetic oligonucleotide
atcagcaaagacaacgcactc

SEQ ID NO: 32742 - DNA, 21 bp, Artificial Sequence
  Description of Artificial Sequence: Synthetic oligonucleotide
atcagcaaactcaacggacca

SEQ ID NO: 32743 - DNA, 21 bp, Artificial Sequence
  Description of Artificial Sequence: Synthetic oligonucleotide
atcagcaaaagctacaacgga

SEQ ID NO: 32744 - DNA, 21 bp, Artificial Sequence
  Description of Artificial Sequence: Synthetic oligonucleotide
atcagcctcgacagacacagc

SEQ ID NO: 32745 - DNA, 21 bp, Artificial Sequence
  Description of Artificial Sequence: Synthetic oligonucleotide
atcagcctcctcagaaacaca

SEQ ID NO: 32746 - DNA, 21 bp, Artificial Sequence
  Description of Artificial Sequence: Synthetic oligonucleotide
atcagcctccaaacaagcctc

SEQ ID NO: 32747 - DNA, 21 bp, Artificial Sequence
  Description of Artificial Sequence: Synthetic oligonucleotide
atcagcctcagattcaacgac

SEQ ID NO: 32748 - DNA, 21 bp, Artificial Sequence
  Description of Artificial Sequence: Synthetic oligonucleotide
atcagcctcagcgcactcgca

SEQ ID NO: 32749 - DNA, 21 bp, Artificial Sequence
  Description of Artificial Sequence: Synthetic oligonucleotide
atcagcatgaaaccaatcagc

SEQ ID NO: 32750 - DNA, 21 bp, Artificial Sequence
  Description of Artificial Sequence: Synthetic oligonucleotide
atcagcatgctcagaccaaca

SEQ ID NO: 32751 - DNA, 21 bp, Artificial Sequence
  Description of Artificial Sequence: Synthetic oligonucleotide
atcagcatgacagtccacagc

SEQ ID NO: 32752 - DNA, 21 bp, Artificial Sequence
  Description of Artificial Sequence: Synthetic oligonucleotide
atcagcatggtcagacaagga

SEQ ID NO: 32753 - DNA, 21 bp, Artificial Sequence
  Description of Artificial Sequence: Synthetic oligonucleotide
atcagcaacgcaatgacacaa

SEQ ID NO: 32754 - DNA, 21 bp, Artificial Sequence
  Description of Artificial Sequence: Synthetic oligonucleotide
atcagcaacggaagagcagtc

SEQ ID NO: 32755 - DNA, 21 bp, Artificial Sequence
  Description of Artificial Sequence: Synthetic oligonucleotide
atcagcaacagcagaagcaca

SEQ ID NO: 32756 - DNA, 21 bp, Artificial Sequence
  Description of Artificial Sequence: Synthetic oligonucleotide
atcagcaacagcagcccaagc

SEQ ID NO: 32757 - DNA, 21 bp, Artificial Sequence
  Description of Artificial Sequence: Synthetic oligonucleotide
atcagcaacgtccaactcgca

SEQ ID NO: 32758 - DNA, 21 bp, Artificial Sequence
  Description of Artificial Sequence: Synthetic oligonucleotide
atcagcccagcaccattccca

SEQ ID NO: 32759 - DNA, 21 bp, Artificial Sequence
  Description of Artificial Sequence: Synthetic oligonucleotide
atcagcccagacccaatgctc

SEQ ID NO: 32760 - DNA, 21 bp, Artificial Sequence
  Description of Artificial Sequence: Synthetic oligonucleotide
atcagcccattcacagtcgaa

SEQ ID NO: 32761 - DNA, 21 bp, Artificial Sequence
  Description of Artificial Sequence: Synthetic oligonucleotide
atcagcccaagagacgtcagc

SEQ ID NO: 32762 - DNA, 21 bp, Artificial Sequence
  Description of Artificial Sequence: Synthetic oligonucleotide
atcagcccaagaaaagcaaca

SEQ ID NO: 32763 - DNA, 21 bp, Artificial Sequence
  Description of Artificial Sequence: Synthetic oligonucleotide
atcagcccaagaaacaacagc

SEQ ID NO: 32764 - DNA, 21 bp, Artificial Sequence
  Description of Artificial Sequence: Synthetic oligonucleotide
atcagcccaagatacccacac

SEQ ID NO: 32765 - DNA, 21 bp, Artificial Sequence
  Description of Artificial Sequence: Synthetic oligonucleotide
atcagcccaagcggaccagca

SEQ ID NO: 32766 - DNA, 21 bp, Artificial Sequence
  Description of Artificial Sequence: Synthetic oligonucleotide
atcagcccagtcagaaacgtc

SEQ ID NO: 32767 - DNA, 21 bp, Artificial Sequence
  Description of Artificial Sequence: Synthetic oligonucleotide
atcagcccatacgaaaacgca

SEQ ID NO: 32768 - DNA, 21 bp, Artificial Sequence
  Description of Artificial Sequence: Synthetic oligonucleotide
atcagcccatacagagtcagc

SEQ ID NO: 32769 - DNA, 21 bp, Artificial Sequence
  Description of Artificial Sequence: Synthetic oligonucleotide
atcagccaacaaagactcaaa

SEQ ID NO: 32770 - DNA, 21 bp, Artificial Sequence
  Description of Artificial Sequence: Synthetic oligonucleotide
atcagccaaagatggccagac

SEQ ID NO: 32771 - DNA, 21 bp, Artificial Sequence
  Description of Artificial Sequence: Synthetic oligonucleotide
atcagccaaacaagatacgac

SEQ ID NO: 32772 - DNA, 21 bp, Artificial Sequence
  Description of Artificial Sequence: Synthetic oligonucleotide
atcagcagagacacagtcatg

SEQ ID NO: 32773 - DNA, 21 bp, Artificial Sequence
  Description of Artificial Sequence: Synthetic oligonucleotide
atcagcagactcgtcagcagc

SEQ ID NO: 32774 - DNA, 21 bp, Artificial Sequence
  Description of Artificial Sequence: Synthetic oligonucleotide
atcagcagaagcaacatcatc

SEQ ID NO: 32775 - DNA, 21 bp, Artificial Sequence
  Description of Artificial Sequence: Synthetic oligonucleotide
atcagcagagtcgtcacaatg

SEQ ID NO: 32776 - DNA, 21 bp, Artificial Sequence
  Description of Artificial Sequence: Synthetic oligonucleotide
atcagcagcgcattcgcacca

SEQ ID NO: 32777 - DNA, 21 bp, Artificial Sequence
  Description of Artificial Sequence: Synthetic oligonucleotide
atcagcagccactgcatggca

SEQ ID NO: 32778 - DNA, 21 bp, Artificial Sequence
  Description of Artificial Sequence: Synthetic oligonucleotide
atcagcagcaaactcgtcagc

SEQ ID NO: 32779 - DNA, 21 bp, Artificial Sequence
  Description of Artificial Sequence: Synthetic oligonucleotide
atcagcagcaacccaacagtc

SEQ ID NO: 32780 - DNA, 21 bp, Artificial Sequence
  Description of Artificial Sequence: Synthetic oligonucleotide
atcagcagcagcgcaacactc

SEQ ID NO: 32781 - DNA, 21 bp, Artificial Sequence
  Description of Artificial Sequence: Synthetic oligonucleotide
atcagcagcacaaacacagca

SEQ ID NO: 32782 - DNA, 21 bp, Artificial Sequence
  Description of Artificial Sequence: Synthetic oligonucleotide
atcagcagcacagtcgaaatc

SEQ ID NO: 32783 - DNA, 21 bp, Artificial Sequence
  Description of Artificial Sequence: Synthetic oligonucleotide
atcagcagcgtccaaaaccca

SEQ ID NO: 32784 - DNA, 21 bp, Artificial Sequence
  Description of Artificial Sequence: Synthetic oligonucleotide
atcagcacacacctcaaaagc

SEQ ID NO: 32785 - DNA, 21 bp, Artificial Sequence
  Description of Artificial Sequence: Synthetic oligonucleotide
atcagcacacacacaaaaagc

SEQ ID NO: 32786 - DNA, 21 bp, Artificial Sequence
  Description of Artificial Sequence: Synthetic oligonucleotide
atcagcacaaacgtcagaagc

SEQ ID NO: 32787 - DNA, 21 bp, Artificial Sequence
  Description of Artificial Sequence: Synthetic oligonucleotide
atcagcacaagaaacccagaa

SEQ ID NO: 32788 - DNA, 21 bp, Artificial Sequence
  Description of Artificial Sequence: Synthetic oligonucleotide
atcagcacaagccaacaacac

SEQ ID NO: 32789 - DNA, 21 bp, Artificial Sequence
  Description of Artificial Sequence: Synthetic oligonucleotide
atcagcacaacaacagtccca

SEQ ID NO: 32790 - DNA, 21 bp, Artificial Sequence
  Description of Artificial Sequence: Synthetic oligonucleotide
atcagcacagtcctcgtcgac

SEQ ID NO: 32791 - DNA, 21 bp, Artificial Sequence
  Description of Artificial Sequence: Synthetic oligonucleotide
atcagcacatgggaatacgaa

SEQ ID NO: 32792 - DNA, 21 bp, Artificial Sequence
  Description of Artificial Sequence: Synthetic oligonucleotide
atcagcacatggagaccaaca

SEQ ID NO: 32793 - DNA, 21 bp, Artificial Sequence
  Description of Artificial Sequence: Synthetic oligonucleotide
atcagcgtcaaaggacaacca

SEQ ID NO: 32794 - DNA, 21 bp, Artificial Sequence
  Description of Artificial Sequence: Synthetic oligonucleotide
atcagcgtcagccaaacagac

SEQ ID NO: 32795 - DNA, 21 bp, Artificial Sequence
  Description of Artificial Sequence: Synthetic oligonucleotide
atcagcgtcacaagcagcagc

SEQ ID NO: 32796 - DNA, 21 bp, Artificial Sequence
  Description of Artificial Sequence: Synthetic oligonucleotide
atcagctacggaacaagaagc

SEQ ID NO: 32797 - DNA, 21 bp, Artificial Sequence
  Description of Artificial Sequence: Synthetic oligonucleotide
atcagctacaacgcaaaagtc

SEQ ID NO: 32798 - DNA, 21 bp, Artificial Sequence
  Description of Artificial Sequence: Synthetic oligonucleotide
atcagctacccaaaaccagtc

SEQ ID NO: 32799 - DNA, 21 bp, Artificial Sequence
  Description of Artificial Sequence: Synthetic oligonucleotide
atcacagcaccacacagcatg

SEQ ID NO: 32800 - DNA, 21 bp, Artificial Sequence
  Description of Artificial Sequence: Synthetic oligonucleotide
atcacagcaagagtcaacgca

SEQ ID NO: 32801 - DNA, 21 bp, Artificial Sequence
  Description of Artificial Sequence: Synthetic oligonucleotide
atcacagcaagatacccaaca

SEQ ID NO: 32802 - DNA, 21 bp, Artificial Sequence
  Description of Artificial Sequence: Synthetic oligonucleotide
atcacagcaagcggactcgtc

SEQ ID NO: 32803 - DNA, 21 bp, Artificial Sequence
  Description of Artificial Sequence: Synthetic oligonucleotide
atcacagcaacacaaagaatg

SEQ ID NO: 32804 - DNA, 21 bp, Artificial Sequence
  Description of Artificial Sequence: Synthetic oligonucleotide
atcacagacgcagcaaaccca

SEQ ID NO: 32805 - DNA, 21 bp, Artificial Sequence
  Description of Artificial Sequence: Synthetic oligonucleotide
atcacagacagagtcgcaatc

SEQ ID NO: 32806 - DNA, 21 bp, Artificial Sequence
  Description of Artificial Sequence: Synthetic oligonucleotide
atcacagaaagaagctgcaca

SEQ ID NO: 32807 - DNA, 21 bp, Artificial Sequence
  Description of Artificial Sequence: Synthetic oligonucleotide
atcacagaagtcaaaagagga

SEQ ID NO: 32808 - DNA, 21 bp, Artificial Sequence
  Description of Artificial Sequence: Synthetic oligonucleotide
atcacattcgaccacgtcaca

SEQ ID NO: 32809 - DNA, 21 bp, Artificial Sequence
  Description of Artificial Sequence: Synthetic oligonucleotide
atcacattcagcggaagcagc

SEQ ID NO: 32810 - DNA, 21 bp, Artificial Sequence
  Description of Artificial Sequence: Synthetic oligonucleotide
atcacaggagacctcaacgga

SEQ ID NO: 32811 - DNA, 21 bp, Artificial Sequence
  Description of Artificial Sequence: Synthetic oligonucleotide
atcacaggaggaagaccagga

SEQ ID NO: 32812 - DNA, 21 bp, Artificial Sequence
  Description of Artificial Sequence: Synthetic oligonucleotide
atcacaggaaacagaacacca

SEQ ID NO: 32813 - DNA, 21 bp, Artificial Sequence
  Description of Artificial Sequence: Synthetic oligonucleotide
atcacaggaagcaacagagac

SEQ ID NO: 32814 - DNA, 21 bp, Artificial Sequence
  Description of Artificial Sequence: Synthetic oligonucleotide
atcacacacgcaagcagcgac

SEQ ID NO: 32815 - DNA, 21 bp, Artificial Sequence
  Description of Artificial Sequence: Synthetic oligonucleotide
atcacacacatcagactcgac

SEQ ID NO: 32816 - DNA, 21 bp, Artificial Sequence
  Description of Artificial Sequence: Synthetic oligonucleotide
atcacacacagcatccaaaga

SEQ ID NO: 32817 - DNA, 21 bp, Artificial Sequence
  Description of Artificial Sequence: Synthetic oligonucleotide
atcacactcggaagcacagga

SEQ ID NO: 32818 - DNA, 21 bp, Artificial Sequence
  Description of Artificial Sequence: Synthetic oligonucleotide
atcacactcagcagccaagga

SEQ ID NO: 32819 - DNA, 21 bp, Artificial Sequence
  Description of Artificial Sequence: Synthetic oligonucleotide
atcacactctacccaaacagc

SEQ ID NO: 32820 - DNA, 21 bp, Artificial Sequence
  Description of Artificial Sequence: Synthetic oligonucleotide
atcacaatgctcgcaggagac

SEQ ID NO: 32821 - DNA, 21 bp, Artificial Sequence
  Description of Artificial Sequence: Synthetic oligonucleotide
atcacaaacgacagaacagtc

SEQ ID NO: 32822 - DNA, 21 bp, Artificial Sequence
  Description of Artificial Sequence: Synthetic oligonucleotide
atcacaaacgaaccaccaaga

SEQ ID NO: 32823 - DNA, 21 bp, Artificial Sequence
  Description of Artificial Sequence: Synthetic oligonucleotide
atcacaccactcacagcagga

SEQ ID NO: 32824 - DNA, 21 bp, Artificial Sequence
  Description of Artificial Sequence: Synthetic oligonucleotide
atcacaccaatgagcatcgtc

SEQ ID NO: 32825 - DNA, 21 bp, Artificial Sequence
  Description of Artificial Sequence: Synthetic oligonucleotide
atcacaccaagccacggaagc

SEQ ID NO: 32826 - DNA, 21 bp, Artificial Sequence
  Description of Artificial Sequence: Synthetic oligonucleotide
atcacaccagtccacgcagaa

SEQ ID NO: 32827 - DNA, 21 bp, Artificial Sequence
  Description of Artificial Sequence: Synthetic oligonucleotide
atcacaccatacgtcagagga

SEQ ID NO: 32828 - DNA, 21 bp, Artificial Sequence
  Description of Artificial Sequence: Synthetic oligonucleotide
atcacacaaccacacgcaaaa

SEQ ID NO: 32829 - DNA, 21 bp, Artificial Sequence
  Description of Artificial Sequence: Synthetic oligonucleotide
atcacaagactcaaactcgac

SEQ ID NO: 32830 - DNA, 21 bp, Artificial Sequence
  Description of Artificial Sequence: Synthetic oligonucleotide
atcacaagaagcgtcgcacca

SEQ ID NO: 32831 - DNA, 21 bp, Artificial Sequence
  Description of Artificial Sequence: Synthetic oligonucleotide
atcacaagcgcagacccacaa

SEQ ID NO: 32832 - DNA, 21 bp, Artificial Sequence
  Description of Artificial Sequence: Synthetic oligonucleotide
atcacaagcaaaacacaagca

SEQ ID NO: 32833 - DNA, 21 bp, Artificial Sequence
  Description of Artificial Sequence: Synthetic oligonucleotide
atcacaagcccaagactccaa

SEQ ID NO: 32834 - DNA, 21 bp, Artificial Sequence
  Description of Artificial Sequence: Synthetic oligonucleotide
atcacaagcacactcccacca

SEQ ID NO: 32835 - DNA, 21 bp, Artificial Sequence
  Description of Artificial Sequence: Synthetic oligonucleotide
atcacaagcacaagagcaagc

SEQ ID NO: 32836 - DNA, 21 bp, Artificial Sequence
  Description of Artificial Sequence: Synthetic oligonucleotide
atcacaagcgtcgacagactc

SEQ ID NO: 32837 - DNA, 21 bp, Artificial Sequence
  Description of Artificial Sequence: Synthetic oligonucleotide
atcacaagcgtcccagtcagc

SEQ ID NO: 32838 - DNA, 21 bp, Artificial Sequence
  Description of Artificial Sequence: Synthetic oligonucleotide
atcacaacaaaatacagccaa

SEQ ID NO: 32839 - DNA, 21 bp, Artificial Sequence
  Description of Artificial Sequence: Synthetic oligonucleotide
atcacaacactcggaccaaca

SEQ ID NO: 32840 - DNA, 21 bp, Artificial Sequence
  Description of Artificial Sequence: Synthetic oligonucleotide
atcacaacaaacagcggaaga

SEQ ID NO: 32841 - DNA, 21 bp, Artificial Sequence
  Description of Artificial Sequence: Synthetic oligonucleotide
atcacaacaccagcagaacaa

SEQ ID NO: 32842 - DNA, 21 bp, Artificial Sequence
  Description of Artificial Sequence: Synthetic oligonucleotide
atcacaacaagagaaacaaca

SEQ ID NO: 32843 - DNA, 21 bp, Artificial Sequence
  Description of Artificial Sequence: Synthetic oligonucleotide
atcacaacaagcgacagagca

SEQ ID NO: 32844 - DNA, 21 bp, Artificial Sequence
  Description of Artificial Sequence: Synthetic oligonucleotide
atcacaacatacaacgaaaac

SEQ ID NO: 32845 - DNA, 21 bp, Artificial Sequence
  Description of Artificial Sequence: Synthetic oligonucleotide
atcacagtcccacaccactac

SEQ ID NO: 32846 - DNA, 21 bp, Artificial Sequence
  Description of Artificial Sequence: Synthetic oligonucleotide
atcacagtcagcagagcagac

SEQ ID NO: 32847 - DNA, 21 bp, Artificial Sequence
  Description of Artificial Sequence: Synthetic oligonucleotide
atcacataccaaaacgcagaa

SEQ ID NO: 32848 - DNA, 21 bp, Artificial Sequence
  Description of Artificial Sequence: Synthetic oligonucleotide
atcgtcgcaacatgcacagca

SEQ ID NO: 32849 - DNA, 21 bp, Artificial Sequence
  Description of Artificial Sequence: Synthetic oligonucleotide
atcgtcgaagcaagcatcatc

SEQ ID NO: 32850 - DNA, 21 bp, Artificial Sequence
  Description of Artificial Sequence: Synthetic oligonucleotide
atcgtcgaaggactcggagac

SEQ ID NO: 32851 - DNA, 21 bp, Artificial Sequence
  Description of Artificial Sequence: Synthetic oligonucleotide
atcgtcgaaacatacctcaca

SEQ ID NO: 32852 - DNA, 21 bp, Artificial Sequence
  Description of Artificial Sequence: Synthetic oligonucleotide
atcgtcggaagcaaactcgac

SEQ ID NO: 32853 - DNA, 21 bp, Artificial Sequence
  Description of Artificial Sequence: Synthetic oligonucleotide
atcgtcaaaggaatcccaatg

SEQ ID NO: 32854 - DNA, 21 bp, Artificial Sequence
  Description of Artificial Sequence: Synthetic oligonucleotide
atcgtcctcgaaagcatgagc

SEQ ID NO: 32855 - DNA, 21 bp, Artificial Sequence
  Description of Artificial Sequence: Synthetic oligonucleotide
atcgtcctccacctcgacgga

SEQ ID NO: 32856 - DNA, 21 bp, Artificial Sequence
  Description of Artificial Sequence: Synthetic oligonucleotide
atcgtcaacctcagcacatac

SEQ ID NO: 32857 - DNA, 21 bp, Artificial Sequence
  Description of Artificial Sequence: Synthetic oligonucleotide
atcgtccaagtcgcaacaagc

SEQ ID NO: 32858 - DNA, 21 bp, Artificial Sequence
  Description of Artificial Sequence: Synthetic oligonucleotide
atcgtcagacaaacaatcagc

SEQ ID NO: 32859 - DNA, 21 bp, Artificial Sequence
  Description of Artificial Sequence: Synthetic oligonucleotide
atcgtcagaagcagaccagaa

SEQ ID NO: 32860 - DNA, 21 bp, Artificial Sequence
  Description of Artificial Sequence: Synthetic oligonucleotide
atcgtcagccacgacttcgaa

SEQ ID NO: 32861 - DNA, 21 bp, Artificial Sequence
  Description of Artificial Sequence: Synthetic oligonucleotide
atcgtcagcagaatcaacagc

SEQ ID NO: 32862 - DNA, 21 bp, Artificial Sequence
  Description of Artificial Sequence: Synthetic oligonucleotide
atcgtcagcagctacacagac

SEQ ID NO: 32863 - DNA, 21 bp, Artificial Sequence
  Description of Artificial Sequence: Synthetic oligonucleotide
atcgtcacaggaagcggagga

SEQ ID NO: 32864 - DNA, 21 bp, Artificial Sequence
  Description of Artificial Sequence: Synthetic oligonucleotide
atcgtcacaggaagcagagaa

SEQ ID NO: 32865 - DNA, 21 bp, Artificial Sequence
  Description of Artificial Sequence: Synthetic oligonucleotide
atcgtcacaaaatgcccagga

SEQ ID NO: 32866 - DNA, 21 bp, Artificial Sequence
  Description of Artificial Sequence: Synthetic oligonucleotide
atcgtcacaagcaacgtcaca

SEQ ID NO: 32867 - DNA, 21 bp, Artificial Sequence
  Description of Artificial Sequence: Synthetic oligonucleotide
atcgtcacaagcacacaacca

SEQ ID NO: 32868 - DNA, 21 bp, Artificial Sequence
  Description of Artificial Sequence: Synthetic oligonucleotide
atctgggacagctgcagagac

SEQ ID NO: 32869 - DNA, 21 bp, Artificial Sequence
  Description of Artificial Sequence: Synthetic oligonucleotide
atctacaaagtcgacagcagc

SEQ ID NO: 32870 - DNA, 21 bp, Artificial Sequence
  Description of Artificial Sequence: Synthetic oligonucleotide
atctacctcagaaacgaccaa

SEQ ID NO: 32871 - DNA, 21 bp, Artificial Sequence
  Description of Artificial Sequence: Synthetic oligonucleotide
atctaccaaagcgaaagccac

SEQ ID NO: 32872 - DNA, 21 bp, Artificial Sequence
  Description of Artificial Sequence: Synthetic oligonucleotide
atctaccaaagccaacaccac

SEQ ID NO: 32873 - DNA, 21 bp, Artificial Sequence
  Description of Artificial Sequence: Synthetic oligonucleotide
atctacagcgcaaaacaacca

SEQ ID NO: 32874 - DNA, 21 bp, Artificial Sequence
  Description of Artificial Sequence: Synthetic oligonucleotide
atctacagcgtcggagcaaca

SEQ ID NO: 32875 - DNA, 21 bp, Artificial Sequence
  Description of Artificial Sequence: Synthetic oligonucleotide
atctacacaggacaagtccac

SEQ ID NO: 32876 - DNA, 21 bp, Artificial Sequence
  Description of Artificial Sequence: Synthetic oligonucleotide
aaagcagcaaaactcctcgac

SEQ ID NO: 32877 - DNA, 21 bp, Artificial Sequence
  Description of Artificial Sequence: Synthetic oligonucleotide
aaagcagcaaaccaaagcagc

SEQ ID NO: 32878 - DNA, 21 bp, Artificial Sequence
  Description of Artificial Sequence: Synthetic oligonucleotide
aaagcagaccacagcaaagaa

SEQ ID NO: 32879 - DNA, 21 bp, Artificial Sequence
  Description of Artificial Sequence: Synthetic oligonucleotide
aaagcagacatccaagtcaga

SEQ ID NO: 32880 - DNA, 21 bp, Artificial Sequence
  Description of Artificial Sequence: Synthetic oligonucleotide
aaagcagaaacagtcgcacca

SEQ ID NO: 32881 - DNA, 21 bp, Artificial Sequence
  Description of Artificial Sequence: Synthetic oligonucleotide
aaagcattcatcggaatcgac

SEQ ID NO: 32882 - DNA, 21 bp, Artificial Sequence
  Description of Artificial Sequence: Synthetic oligonucleotide
aaagcattcagcccagcactc

SEQ ID NO: 32883 - DNA, 21 bp, Artificial Sequence
  Description of Artificial Sequence: Synthetic oligonucleotide
aaagcaggatgcagcatcagc

SEQ ID NO: 32884 - DNA, 21 bp, Artificial Sequence
  Description of Artificial Sequence: Synthetic oligonucleotide
aaagcaggagtcccagtccca

SEQ ID NO: 32885 - DNA, 21 bp, Artificial Sequence
  Description of Artificial Sequence: Synthetic oligonucleotide
aaagcacacagcacacaaaca

SEQ ID NO: 32886 - DNA, 21 bp, Artificial Sequence
  Description of Artificial Sequence: Synthetic oligonucleotide
aaagcaatcagccaaccattc

SEQ ID NO: 32887 - DNA, 21 bp, Artificial Sequence
  Description of Artificial Sequence: Synthetic oligonucleotide
aaagcactcccaaactacagc

SEQ ID NO: 32888 - DNA, 21 bp, Artificial Sequence
  Description of Artificial Sequence: Synthetic oligonucleotide
aaagcactccaaagatacgac

SEQ ID NO: 32889 - DNA, 21 bp, Artificial Sequence
  Description of Artificial Sequence: Synthetic oligonucleotide
aaagcaatgagcatggacagc

SEQ ID NO: 32890 - DNA, 21 bp, Artificial Sequence
  Description of Artificial Sequence: Synthetic oligonucleotide
aaagcaaaccaactcgacaca

SEQ ID NO: 32891 - DNA, 21 bp, Artificial Sequence
  Description of Artificial Sequence: Synthetic oligonucleotide
aaagcaccactcccagacttc

SEQ ID NO: 32892 - DNA, 21 bp, Artificial Sequence
  Description of Artificial Sequence: Synthetic oligonucleotide
aaagcaccaacaccaagcgtc

SEQ ID NO: 32893 - DNA, 21 bp, Artificial Sequence
  Description of Artificial Sequence: Synthetic oligonucleotide
aaagcacaagaaagagcaaca

SEQ ID NO: 32894 - DNA, 21 bp, Artificial Sequence
  Description of Artificial Sequence: Synthetic oligonucleotide
aaagcacaaagcgcaaacttc

SEQ ID NO: 32895 - DNA, 21 bp, Artificial Sequence
  Description of Artificial Sequence: Synthetic oligonucleotide
aaagcaagcgcaagcatcgca

SEQ ID NO: 32896 - DNA, 21 bp, Artificial Sequence
  Description of Artificial Sequence: Synthetic oligonucleotide
aaagcaagcttcagcccagac

SEQ ID NO: 32897 - DNA, 21 bp, Artificial Sequence
  Description of Artificial Sequence: Synthetic oligonucleotide
aaagcaagccaagcatgcatg

SEQ ID NO: 32898 - DNA, 21 bp, Artificial Sequence
  Description of Artificial Sequence: Synthetic oligonucleotide
aaagcaagccaattcagccca

SEQ ID NO: 32899 - DNA, 21 bp, Artificial Sequence
  Description of Artificial Sequence: Synthetic oligonucleotide
aaagcaagccaaagcggaaca

SEQ ID NO: 32900 - DNA, 21 bp, Artificial Sequence
  Description of Artificial Sequence: Synthetic oligonucleotide
aaagcaacaccaggagtccac

SEQ ID NO: 32901 - DNA, 21 bp, Artificial Sequence
  Description of Artificial Sequence: Synthetic oligonucleotide
aaagcaacaccaaacgtcgga

SEQ ID NO: 32902 - DNA, 21 bp, Artificial Sequence
  Description of Artificial Sequence: Synthetic oligonucleotide
aaagcagtcgcaagcacattc

SEQ ID NO: 32903 - DNA, 21 bp, Artificial Sequence
  Description of Artificial Sequence: Synthetic oligonucleotide
aaagcagtcatcagcccaaca

SEQ ID NO: 32904 - DNA, 21 bp, Artificial Sequence
  Description of Artificial Sequence: Synthetic oligonucleotide
aaagcagtcaacggactcagc

SEQ ID NO: 32905 - DNA, 21 bp, Artificial Sequence
  Description of Artificial Sequence: Synthetic oligonucleotide
aaagcagtcagctggggacca

SEQ ID NO: 32906 - DNA, 21 bp, Artificial Sequence
  Description of Artificial Sequence: Synthetic oligonucleotide
aaatgcagaacatgcagcgtc

SEQ ID NO: 32907 - DNA, 21 bp, Artificial Sequence
  Description of Artificial Sequence: Synthetic oligonucleotide
aaagacgaaccaaactacgga

SEQ ID NO: 32908 - DNA, 21 bp, Artificial Sequence
  Description of Artificial Sequence: Synthetic oligonucleotide
aaagacttcagcaacacactc

SEQ ID NO: 32909 - DNA, 21 bp, Artificial Sequence
  Description of Artificial Sequence: Synthetic oligonucleotide
aaagacggaccattcccaatg

SEQ ID NO: 32910 - DNA, 21 bp, Artificial Sequence
  Description of Artificial Sequence: Synthetic oligonucleotide
aaagacaaaaacccaagcgac

SEQ ID NO: 32911 - DNA, 21 bp, Artificial Sequence
  Description of Artificial Sequence: Synthetic oligonucleotide
aaagacaaagtcgaaatgaac

SEQ ID NO: 32912 - DNA, 21 bp, Artificial Sequence
  Description of Artificial Sequence: Synthetic oligonucleotide
aaagacctcacaagacacgca

SEQ ID NO: 32913 - DNA, 21 bp, Artificial Sequence
  Description of Artificial Sequence: Synthetic oligonucleotide
aaagacatgagaagcaaagac

SEQ ID NO: 32914 - DNA, 21 bp, Artificial Sequence
  Description of Artificial Sequence: Synthetic oligonucleotide
aaagacaacaaaatccaaagc

SEQ ID NO: 32915 - DNA, 21 bp, Artificial Sequence
  Description of Artificial Sequence: Synthetic oligonucleotide
aaagacccaggaagaatcagc

SEQ ID NO: 32916 - DNA, 21 bp, Artificial Sequence
  Description of Artificial Sequence: Synthetic oligonucleotide
aaagacccaatcagcagcgtc

SEQ ID NO: 32917 - DNA, 21 bp, Artificial Sequence
  Description of Artificial Sequence: Synthetic oligonucleotide
aaagacccactcaactgcgca

SEQ ID NO: 32918 - DNA, 21 bp, Artificial Sequence
  Description of Artificial Sequence: Synthetic oligonucleotide
aaagacccaccacaactccac

SEQ ID NO: 32919 - DNA, 21 bp, Artificial Sequence
  Description of Artificial Sequence: Synthetic oligonucleotide
aaagacccacaaacaacagac

SEQ ID NO: 32920 - DNA, 21 bp, Artificial Sequence
  Description of Artificial Sequence: Synthetic oligonucleotide
aaagacagaagcgcaccacca

SEQ ID NO: 32921 - DNA, 21 bp, Artificial Sequence
  Description of Artificial Sequence: Synthetic oligonucleotide
aaagacagaagcctcgaccca

SEQ ID NO: 32922 - DNA, 21 bp, Artificial Sequence
  Description of Artificial Sequence: Synthetic oligonucleotide
aaagacagcgcagcaaacttc

SEQ ID NO: 32923 - DNA, 21 bp, Artificial Sequence
  Description of Artificial Sequence: Synthetic oligonucleotide
aaagacagcacactcctcagc

SEQ ID NO: 32924 - DNA, 21 bp, Artificial Sequence
  Description of Artificial Sequence: Synthetic oligonucleotide
aaagacacagacccactcagc

SEQ ID NO: 32925 - DNA, 21 bp, Artificial Sequence
  Description of Artificial Sequence: Synthetic oligonucleotide
aaagacacaatccacgtcagc

SEQ ID NO: 32926 - DNA, 21 bp, Artificial Sequence
  Description of Artificial Sequence: Synthetic oligonucleotide
aaagacacactcacattcaga

SEQ ID NO: 32927 - DNA, 21 bp, Artificial Sequence
  Description of Artificial Sequence: Synthetic oligonucleotide
aaagacacaccaaacacagtc

SEQ ID NO: 32928 - DNA, 21 bp, Artificial Sequence
  Description of Artificial Sequence: Synthetic oligonucleotide
aaagacacagtcttctaccca

SEQ ID NO: 32929 - DNA, 21 bp, Artificial Sequence
  Description of Artificial Sequence: Synthetic oligonucleotide
aaagaagacagctaccaccca

SEQ ID NO: 32930 - DNA, 21 bp, Artificial Sequence
  Description of Artificial Sequence: Synthetic oligonucleotide
aaagaagacacaaacagaaca

SEQ ID NO: 32931 - DNA, 21 bp, Artificial Sequence
  Description of Artificial Sequence: Synthetic oligonucleotide
aaagaaggaggagaaccaaga

SEQ ID NO: 32932 - DNA, 21 bp, Artificial Sequence
  Description of Artificial Sequence: Synthetic oligonucleotide
aaagaaggaagcaacagagga

SEQ ID NO: 32933 - DNA, 21 bp, Artificial Sequence
  Description of Artificial Sequence: Synthetic oligonucleotide
aaagaacacggagtcatcttc

SEQ ID NO: 32934 - DNA, 21 bp, Artificial Sequence
  Description of Artificial Sequence: Synthetic oligonucleotide
aaagaaatcggattcgcaaca

SEQ ID NO: 32935 - DNA, 21 bp, Artificial Sequence
  Description of Artificial Sequence: Synthetic oligonucleotide
aaagaaaaaccactcaacagc

SEQ ID NO: 32936 - DNA, 21 bp, Artificial Sequence
  Description of Artificial Sequence: Synthetic oligonucleotide
aaagaactcgcagtcggactc

SEQ ID NO: 32937 - DNA, 21 bp, Artificial Sequence
  Description of Artificial Sequence: Synthetic oligonucleotide
aaagaactcgaactccaccca

SEQ ID NO: 32938 - DNA, 21 bp, Artificial Sequence
  Description of Artificial Sequence: Synthetic oligonucleotide
aaagaaatggacatccactgg

SEQ ID NO: 32939 - DNA, 21 bp, Artificial Sequence
  Description of Artificial Sequence: Synthetic oligonucleotide
aaagaaatgagcccaacaaga

SEQ ID NO: 32940 - DNA, 21 bp, Artificial Sequence
  Description of Artificial Sequence: Synthetic oligonucleotide
aaagaaaacccagcaatcgtc

SEQ ID NO: 32941 - DNA, 21 bp, Artificial Sequence
  Description of Artificial Sequence: Synthetic oligonucleotide
aaagaaccaaaagtctggctc

SEQ ID NO: 32942 - DNA, 21 bp, Artificial Sequence
  Description of Artificial Sequence: Synthetic oligonucleotide
aaagaaccaagcacaacaagc

SEQ ID NO: 32943 - DNA, 21 bp, Artificial Sequence
  Description of Artificial Sequence: Synthetic oligonucleotide
aaagaaagcatcagacaaagc

SEQ ID NO: 32944 - DNA, 21 bp, Artificial Sequence
  Description of Artificial Sequence: Synthetic oligonucleotide
aaagaaagcagcagctacctc

SEQ ID NO: 32945 - DNA, 21 bp, Artificial Sequence
  Description of Artificial Sequence: Synthetic oligonucleotide
aaagaaacacaaaacatgcca

SEQ ID NO: 32946 - DNA, 21 bp, Artificial Sequence
  Description of Artificial Sequence: Synthetic oligonucleotide
aaagaagtcaaaacaagcgga

SEQ ID NO: 32947 - DNA, 21 bp, Artificial Sequence
  Description of Artificial Sequence: Synthetic oligonucleotide
aaagaatggacaaacagcgga

SEQ ID NO: 32948 - DNA, 21 bp, Artificial Sequence
  Description of Artificial Sequence: Synthetic oligonucleotide
aaattcgcagcaatgctcaac

SEQ ID NO: 32949 - DNA, 21 bp, Artificial Sequence
  Description of Artificial Sequence: Synthetic oligonucleotide
aaattcgacctcgcaagcgac

SEQ ID NO: 32950 - DNA, 21 bp, Artificial Sequence
  Description of Artificial Sequence: Synthetic oligonucleotide
aaattcgacagcgaactcagc

SEQ ID NO: 32951 - DNA, 21 bp, Artificial Sequence
  Description of Artificial Sequence: Synthetic oligonucleotide
aaattcggagacaacgtcctc

SEQ ID NO: 32952 - DNA, 21 bp, Artificial Sequence
  Description of Artificial Sequence: Synthetic oligonucleotide
aaattcaacagcgcaagcgac

SEQ ID NO: 32953 - DNA, 21 bp, Artificial Sequence
  Description of Artificial Sequence: Synthetic oligonucleotide
aaattcccagaagcacaagga

SEQ ID NO: 32954 - DNA, 21 bp, Artificial Sequence
  Description of Artificial Sequence: Synthetic oligonucleotide
aaattcccacacccaccagca

SEQ ID NO: 32955 - DNA, 21 bp, Artificial Sequence
  Description of Artificial Sequence: Synthetic oligonucleotide
aaattccaaagagaccaagtc

SEQ ID NO: 32956 - DNA, 21 bp, Artificial Sequence
  Description of Artificial Sequence: Synthetic oligonucleotide
aaattccaaagcgtcggaatc

SEQ ID NO: 32957 - DNA, 21 bp, Artificial Sequence
  Description of Artificial Sequence: Synthetic oligonucleotide
aaattcagccaaacagtccca

SEQ ID NO: 32958 - DNA, 21 bp, Artificial Sequence
  Description of Artificial Sequence: Synthetic oligonucleotide
aaattcagcagcaacatcgac

SEQ ID NO: 32959 - DNA, 21 bp, Artificial Sequence
  Description of Artificial Sequence: Synthetic oligonucleotide
aaaggagcactcggagtccca

SEQ ID NO: 32960 - DNA, 21 bp, Artificial Sequence
  Description of Artificial Sequence: Synthetic oligonucleotide
aaaggagaccacgtcacagac

SEQ ID NO: 32961 - DNA, 21 bp, Artificial Sequence
  Description of Artificial Sequence: Synthetic oligonucleotide
aaaggagacatcatcagcgaa

SEQ ID NO: 32962 - DNA, 21 bp, Artificial Sequence
  Description of Artificial Sequence: Synthetic oligonucleotide
aaaggagacatccaagtcagc

SEQ ID NO: 32963 - DNA, 21 bp, Artificial Sequence
  Description of Artificial Sequence: Synthetic oligonucleotide
aaaggagaaatcccaatcgaa

SEQ ID NO: 32964 - DNA, 21 bp, Artificial Sequence
  Description of Artificial Sequence: Synthetic oligonucleotide
aaaggagaagtccaaagcatg

SEQ ID NO: 32965 - DNA, 21 bp, Artificial Sequence
  Description of Artificial Sequence: Synthetic oligonucleotide
aaaggagaatggccaagagaa

SEQ ID NO: 32966 - DNA, 21 bp, Artificial Sequence
  Description of Artificial Sequence: Synthetic oligonucleotide
aaaggattcgacgaaagaagc

SEQ ID NO: 32967 - DNA, 21 bp, Artificial Sequence
  Description of Artificial Sequence: Synthetic oligonucleotide
aaaggaggagtcgcacaatac

SEQ ID NO: 32968 - DNA, 21 bp, Artificial Sequence
  Description of Artificial Sequence: Synthetic oligonucleotide
aaaggactcggagtcgtccca

SEQ ID NO: 32969 - DNA, 21 bp, Artificial Sequence
  Description of Artificial Sequence: Synthetic oligonucleotide
aaaggaccaagcatcgcatgg

SEQ ID NO: 32970 - DNA, 21 bp, Artificial Sequence
  Description of Artificial Sequence: Synthetic oligonucleotide
aaaggaccaagcccaggactc

SEQ ID NO: 32971 - DNA, 21 bp, Artificial Sequence
  Description of Artificial Sequence: Synthetic oligonucleotide
aaaggacaaggacaactcaac

SEQ ID NO: 32972 - DNA, 21 bp, Artificial Sequence
  Description of Artificial Sequence: Synthetic oligonucleotide
aaaggacaaagcagcaacagc

SEQ ID NO: 32973 - DNA, 21 bp, Artificial Sequence
  Description of Artificial Sequence: Synthetic oligonucleotide
aaaggaagagacgcaacaagc

SEQ ID NO: 32974 - DNA, 21 bp, Artificial Sequence
  Description of Artificial Sequence: Synthetic oligonucleotide
aaaggaagcggagtcatcgtc

SEQ ID NO: 32975 - DNA, 21 bp, Artificial Sequence
  Description of Artificial Sequence: Synthetic oligonucleotide
aaaggaagcagcagcatgcac

SEQ ID NO: 32976 - DNA, 21 bp, Artificial Sequence
  Description of Artificial Sequence: Synthetic oligonucleotide
aaaggaacagacctcctcgca

SEQ ID NO: 32977 - DNA, 21 bp, Artificial Sequence
  Description of Artificial Sequence: Synthetic oligonucleotide
aaaggaacaacagtcagcaac

SEQ ID NO: 32978 - DNA, 21 bp, Artificial Sequence
  Description of Artificial Sequence: Synthetic oligonucleotide
aaaggaacaacagtcgtcgtc

SEQ ID NO: 32979 - DNA, 21 bp, Artificial Sequence
  Description of Artificial Sequence: Synthetic oligonucleotide
aaaggaacatacgcaaacaca

SEQ ID NO: 32980 - DNA, 21 bp, Artificial Sequence
  Description of Artificial Sequence: Synthetic oligonucleotide
aaaggaacatacaacgcacac

SEQ ID NO: 32981 - DNA, 21 bp, Artificial Sequence
  Description of Artificial Sequence: Synthetic oligonucleotide
aaaggagtcatcccagaaaaa

SEQ ID NO: 32982 - DNA, 21 bp, Artificial Sequence
  Description of Artificial Sequence: Synthetic oligonucleotide
aaaggagtcctcacagcagtc

SEQ ID NO: 32983 - DNA, 21 bp, Artificial Sequence
  Description of Artificial Sequence: Synthetic oligonucleotide
aaaggagtcaacttcctcgac

SEQ ID NO: 32984 - DNA, 21 bp, Artificial Sequence
  Description of Artificial Sequence: Synthetic oligonucleotide
aaacacgcacaaacaatccca

SEQ ID NO: 32985 - DNA, 21 bp, Artificial Sequence
  Description of Artificial Sequence: Synthetic oligonucleotide
aaacacgacgacagcggaatg

SEQ ID NO: 32986 - DNA, 21 bp, Artificial Sequence
  Description of Artificial Sequence: Synthetic oligonucleotide
aaacacgaaaactggatgaca

SEQ ID NO: 32987 - DNA, 21 bp, Artificial Sequence
  Description of Artificial Sequence: Synthetic oligonucleotide
aaacacgaaccacacggaagc

SEQ ID NO: 32988 - DNA, 21 bp, Artificial Sequence
  Description of Artificial Sequence: Synthetic oligonucleotide
aaacacggagtcgaaatcctc

SEQ ID NO: 32989 - DNA, 21 bp, Artificial Sequence
  Description of Artificial Sequence: Synthetic oligonucleotide
aaacaccacacagtcgaaatg

SEQ ID NO: 32990 - DNA, 21 bp, Artificial Sequence
  Description of Artificial Sequence: Synthetic oligonucleotide
aaacacatcccaggaccagac

SEQ ID NO: 32991 - DNA, 21 bp, Artificial Sequence
  Description of Artificial Sequence: Synthetic oligonucleotide
aaacacatcccaagcgacaga

SEQ ID NO: 32992 - DNA, 21 bp, Artificial Sequence
  Description of Artificial Sequence: Synthetic oligonucleotide
aaacacccaaacgtcccaaca

SEQ ID NO: 32993 - DNA, 21 bp, Artificial Sequence
  Description of Artificial Sequence: Synthetic oligonucleotide
aaacacccaccagcactcaca

SEQ ID NO: 32994 - DNA, 21 bp, Artificial Sequence
  Description of Artificial Sequence: Synthetic oligonucleotide
aaacacccaccagcagtcctc

SEQ ID NO: 32995 - DNA, 21 bp, Artificial Sequence
  Description of Artificial Sequence: Synthetic oligonucleotide
aaacaccaaagcacaatcatc

SEQ ID NO: 32996 - DNA, 21 bp, Artificial Sequence
  Description of Artificial Sequence: Synthetic oligonucleotide
aaacacagcgcagaactcgga

SEQ ID NO: 32997 - DNA, 21 bp, Artificial Sequence
  Description of Artificial Sequence: Synthetic oligonucleotide
aaacacagcatggcaacaaac

SEQ ID NO: 32998 - DNA, 21 bp, Artificial Sequence
  Description of Artificial Sequence: Synthetic oligonucleotide
aaacacagcaacacaccaaac

SEQ ID NO: 32999 - DNA, 21 bp, Artificial Sequence
  Description of Artificial Sequence: Synthetic oligonucleotide
aaacacagctacatggaaaca

SEQ ID NO: 33000 - DNA, 21 bp, Artificial Sequence
  Description of Artificial Sequence: Synthetic oligonucleotide
aaacacacagcactcgtccca

SEQ ID NO: 33001 - DNA, 21 bp, Artificial Sequence
  Description of Artificial Sequence: Synthetic oligonucleotide
aaacacacagcaagcatggca

SEQ ID NO: 33002 - DNA, 21 bp, Artificial Sequence
  Description of Artificial Sequence: Synthetic oligonucleotide
aaacacacacaaaacgacgga

SEQ ID NO: 33003 - DNA, 21 bp, Artificial Sequence
  Description of Artificial Sequence: Synthetic oligonucleotide
aaacacacaagcttcgcacaa

SEQ ID NO: 33004 - DNA, 21 bp, Artificial Sequence
  Description of Artificial Sequence: Synthetic oligonucleotide
aaacacacaacaacaatgttc

SEQ ID NO: 33005 - DNA, 21 bp, Artificial Sequence
  Description of Artificial Sequence: Synthetic oligonucleotide
aaaatcgcaccaatgccacac

SEQ ID NO: 33006 - DNA, 21 bp, Artificial Sequence
  Description of Artificial Sequence: Synthetic oligonucleotide
aaaatcgcaagaagcgaagga

SEQ ID NO: 33007 - DNA, 21 bp, Artificial Sequence
  Description of Artificial Sequence: Synthetic oligonucleotide
aaaatcgcaagcagcctcgga

SEQ ID NO: 33008 - DNA, 21 bp, Artificial Sequence
  Description of Artificial Sequence: Synthetic oligonucleotide
aaaatcgcaacaacaccactc

SEQ ID NO: 33009 - DNA, 21 bp, Artificial Sequence
  Description of Artificial Sequence: Synthetic oligonucleotide
aaaatccacaacctcaacagc

SEQ ID NO: 33010 - DNA, 21 bp, Artificial Sequence
  Description of Artificial Sequence: Synthetic oligonucleotide
aaaatcaacacagcactcaca

SEQ ID NO: 33011 - DNA, 21 bp, Artificial Sequence
  Description of Artificial Sequence: Synthetic oligonucleotide
aaaatcccaatgcaaagcgca

SEQ ID NO: 33012 - DNA, 21 bp, Artificial Sequence
  Description of Artificial Sequence: Synthetic oligonucleotide
aaaatcacagcaacagtcaca

SEQ ID NO: 33013 - DNA, 21 bp, Artificial Sequence
  Description of Artificial Sequence: Synthetic oligonucleotide
aaaaaagacctcagcatgtac

SEQ ID NO: 33014 - DNA, 21 bp, Artificial Sequence
  Description of Artificial Sequence: Synthetic oligonucleotide
aaaaaagacacaggaatcaac

SEQ ID NO: 33015 - DNA, 21 bp, Artificial Sequence
  Description of Artificial Sequence: Synthetic oligonucleotide
aaaaaaccagaagactggaga

SEQ ID NO: 33016 - DNA, 21 bp, Artificial Sequence
  Description of Artificial Sequence: Synthetic oligonucleotide
aaaaaacaaagcgtcgaacca

SEQ ID NO: 33017 - DNA, 21 bp, Artificial Sequence
  Description of Artificial Sequence: Synthetic oligonucleotide
aaaaaagtcagcgacgcactc

SEQ ID NO: 33018 - DNA, 21 bp, Artificial Sequence
  Description of Artificial Sequence: Synthetic oligonucleotide
aaactcgcaggaaaaagcgac

SEQ ID NO: 33019 - DNA, 21 bp, Artificial Sequence
  Description of Artificial Sequence: Synthetic oligonucleotide
aaactcgcaccaagcgtcaca

SEQ ID NO: 33020 - DNA, 21 bp, Artificial Sequence
  Description of Artificial Sequence: Synthetic oligonucleotide
aaactcgcaagcggactccca

SEQ ID NO: 33021 - DNA, 21 bp, Artificial Sequence
  Description of Artificial Sequence: Synthetic oligonucleotide
aaactcgcaagcccaagccca

SEQ ID NO: 33022 - DNA, 21 bp, Artificial Sequence
  Description of Artificial Sequence: Synthetic oligonucleotide
aaactcgcaagcgtcagcgtc

SEQ ID NO: 33023 - DNA, 21 bp, Artificial Sequence
  Description of Artificial Sequence: Synthetic oligonucleotide
aaactcgcaacaacaagagac

SEQ ID NO: 33024 - DNA, 21 bp, Artificial Sequence
  Description of Artificial Sequence: Synthetic oligonucleotide
aaactcgacatcaactaccca

SEQ ID NO: 33025 - DNA, 21 bp, Artificial Sequence
  Description of Artificial Sequence: Synthetic oligonucleotide
aaactcgaaaacggaagctgg

SEQ ID NO: 33026 - DNA, 21 bp, Artificial Sequence
  Description of Artificial Sequence: Synthetic oligonucleotide
aaactcggagcagtcagcctc

SEQ ID NO: 33027 - DNA, 21 bp, Artificial Sequence
  Description of Artificial Sequence: Synthetic oligonucleotide
aaactcggagaaaacacagac

SEQ ID NO: 33028 - DNA, 21 bp, Artificial Sequence
  Description of Artificial Sequence: Synthetic oligonucleotide
aaactcggacacctccacagc

SEQ ID NO: 33029 - DNA, 21 bp, Artificial Sequence
  Description of Artificial Sequence: Synthetic oligonucleotide
aaactcggaacaacaagcagc

SEQ ID NO: 33030 - DNA, 21 bp, Artificial Sequence
  Description of Artificial Sequence: Synthetic oligonucleotide
aaactccacgtcaacacacca

SEQ ID NO: 33031 - DNA, 21 bp, Artificial Sequence
  Description of Artificial Sequence: Synthetic oligonucleotide
aaactcctcggagcagtcgga

SEQ ID NO: 33032 - DNA, 21 bp, Artificial Sequence
  Description of Artificial Sequence: Synthetic oligonucleotide
aaactcctcaaagcaccactc

SEQ ID NO: 33033 - DNA, 21 bp, Artificial Sequence
  Description of Artificial Sequence: Synthetic oligonucleotide
aaactcctcccagaaccagga

SEQ ID NO: 33034 - DNA, 21 bp, Artificial Sequence
  Description of Artificial Sequence: Synthetic oligonucleotide
aaactcctcccaggacaacca

SEQ ID NO: 33035 - DNA, 21 bp, Artificial Sequence
  Description of Artificial Sequence: Synthetic oligonucleotide
aaactcctcccaaacccacca

SEQ ID NO: 33036 - DNA, 21 bp, Artificial Sequence
  Description of Artificial Sequence: Synthetic oligonucleotide
aaactcctcagcatcatggga

SEQ ID NO: 33037 - DNA, 21 bp, Artificial Sequence
  Description of Artificial Sequence: Synthetic oligonucleotide
aaactcctcagcacaggaaca

SEQ ID NO: 33038 - DNA, 21 bp, Artificial Sequence
  Description of Artificial Sequence: Synthetic oligonucleotide
aaactcaacagcccagacgac

SEQ ID NO: 33039 - DNA, 21 bp, Artificial Sequence
  Description of Artificial Sequence: Synthetic oligonucleotide
aaactcccaaacgtcacacca

SEQ ID NO: 33040 - DNA, 21 bp, Artificial Sequence
  Description of Artificial Sequence: Synthetic oligonucleotide
aaactcccaagcgaactcatc

SEQ ID NO: 33041 - DNA, 21 bp, Artificial Sequence
  Description of Artificial Sequence: Synthetic oligonucleotide
aaactccaagtcccattcagc

SEQ ID NO: 33042 - DNA, 21 bp, Artificial Sequence
  Description of Artificial Sequence: Synthetic oligonucleotide
aaactcagagacatctaccca

SEQ ID NO: 33043 - DNA, 21 bp, Artificial Sequence
  Description of Artificial Sequence: Synthetic oligonucleotide
aaactcagcggagaaatcgtc

SEQ ID NO: 33044 - DNA, 21 bp, Artificial Sequence
  Description of Artificial Sequence: Synthetic oligonucleotide
aaactcagccaccaacaattc

SEQ ID NO: 33045 - DNA, 21 bp, Artificial Sequence
  Description of Artificial Sequence: Synthetic oligonucleotide
aaactcagcccaacactcagc

SEQ ID NO: 33046 - DNA, 21 bp, Artificial Sequence
  Description of Artificial Sequence: Synthetic oligonucleotide
aaactcagcagcccagcactc

SEQ ID NO: 33047 - DNA, 21 bp, Artificial Sequence
  Description of Artificial Sequence: Synthetic oligonucleotide
aaactcagcagcagcagctgg

SEQ ID NO: 33048 - DNA, 21 bp, Artificial Sequence
  Description of Artificial Sequence: Synthetic oligonucleotide
aaactcagcacagaaagctgg

SEQ ID NO: 33049 - DNA, 21 bp, Artificial Sequence
  Description of Artificial Sequence: Synthetic oligonucleotide
aaactcagctacagcacactc

SEQ ID NO: 33050 - DNA, 21 bp, Artificial Sequence
  Description of Artificial Sequence: Synthetic oligonucleotide
aaactcacagaaatcgtcgca

SEQ ID NO: 33051 - DNA, 21 bp, Artificial Sequence
  Description of Artificial Sequence: Synthetic oligonucleotide
aaactcacaggatgcaacgac

SEQ ID NO: 33052 - DNA, 21 bp, Artificial Sequence
  Description of Artificial Sequence: Synthetic oligonucleotide
aaactcacaatgacagcacca

SEQ ID NO: 33053 - DNA, 21 bp, Artificial Sequence
  Description of Artificial Sequence: Synthetic oligonucleotide
aaactcacaagcccatacgca

SEQ ID NO: 33054 - DNA, 21 bp, Artificial Sequence
  Description of Artificial Sequence: Synthetic oligonucleotide
aaactcacaagcagcccaaca

SEQ ID NO: 33055 - DNA, 21 bp, Artificial Sequence
  Description of Artificial Sequence: Synthetic oligonucleotide
aaactcacaagcagcacagtc

SEQ ID NO: 33056 - DNA, 21 bp, Artificial Sequence
  Description of Artificial Sequence: Synthetic oligonucleotide
aaaatggcagaagacaaagtc

SEQ ID NO: 33057 - DNA, 21 bp, Artificial Sequence
  Description of Artificial Sequence: Synthetic oligonucleotide
aaaatggacagcgtcctccca

SEQ ID NO: 33058 - DNA, 21 bp, Artificial Sequence
  Description of Artificial Sequence: Synthetic oligonucleotide
aaaatggaacacagaatgctc

SEQ ID NO: 33059 - DNA, 21 bp, Artificial Sequence
  Description of Artificial Sequence: Synthetic oligonucleotide
aaaatgggaacaacactcgga

SEQ ID NO: 33060 - DNA, 21 bp, Artificial Sequence
  Description of Artificial Sequence: Synthetic oligonucleotide
aaaatgctcagcccacaagtc

SEQ ID NO: 33061 - DNA, 21 bp, Artificial Sequence
  Description of Artificial Sequence: Synthetic oligonucleotide
aaaatgaacagcgcagcagga

SEQ ID NO: 33062 - DNA, 21 bp, Artificial Sequence
  Description of Artificial Sequence: Synthetic oligonucleotide
aaaatgccagaagcactcaga

SEQ ID NO: 33063 - DNA, 21 bp, Artificial Sequence
  Description of Artificial Sequence: Synthetic oligonucleotide
aaaatgccaatcccagtccca

SEQ ID NO: 33064 - DNA, 21 bp, Artificial Sequence
  Description of Artificial Sequence: Synthetic oligonucleotide
aaaatgagccacagcctcgac

SEQ ID NO: 33065 - DNA, 21 bp, Artificial Sequence
  Description of Artificial Sequence: Synthetic oligonucleotide
aaaaacgcaatcaacatgatc

SEQ ID NO: 33066 - DNA, 21 bp, Artificial Sequence
  Description of Artificial Sequence: Synthetic oligonucleotide
aaaaacgcaaaaacaatccca

SEQ ID NO: 33067 - DNA, 21 bp, Artificial Sequence
  Description of Artificial Sequence: Synthetic oligonucleotide
aaaaacgcactcccaacaagc

SEQ ID NO: 33068 - DNA, 21 bp, Artificial Sequence
  Description of Artificial Sequence: Synthetic oligonucleotide
aaaaacgcagtcagcggaagc

SEQ ID NO: 33069 - DNA, 21 bp, Artificial Sequence
  Description of Artificial Sequence: Synthetic oligonucleotide
aaaaacgcagtcacaagcgtc

SEQ ID NO: 33070 - DNA, 21 bp, Artificial Sequence
  Description of Artificial Sequence: Synthetic oligonucleotide
aaaaacgaaagactcccaatg

SEQ ID NO: 33071 - DNA, 21 bp, Artificial Sequence
  Description of Artificial Sequence: Synthetic oligonucleotide
aaaaacgaaacaagcagccca

SEQ ID NO: 33072 - DNA, 21 bp, Artificial Sequence
  Description of Artificial Sequence: Synthetic oligonucleotide
aaaaacggagacatccactgc

SEQ ID NO: 33073 - DNA, 21 bp, Artificial Sequence
  Description of Artificial Sequence: Synthetic oligonucleotide
aaaaacggaatcacaccaaac

SEQ ID NO: 33074 - DNA, 21 bp, Artificial Sequence
  Description of Artificial Sequence: Synthetic oligonucleotide
aaaaacggactcagcccagca

SEQ ID NO: 33075 - DNA, 21 bp, Artificial Sequence
  Description of Artificial Sequence: Synthetic oligonucleotide
aaaaacggaacagcacaaagc

SEQ ID NO: 33076 - DNA, 21 bp, Artificial Sequence
  Description of Artificial Sequence: Synthetic oligonucleotide
aaaaaccaccaatacgcagca

SEQ ID NO: 33077 - DNA, 21 bp, Artificial Sequence
  Description of Artificial Sequence: Synthetic oligonucleotide
aaaaacctcccactcgtcagc

SEQ ID NO: 33078 - DNA, 21 bp, Artificial Sequence
  Description of Artificial Sequence: Synthetic oligonucleotide
aaaaacctcagcctcggagga

SEQ ID NO: 33079 - DNA, 21 bp, Artificial Sequence
  Description of Artificial Sequence: Synthetic oligonucleotide
aaaaacccactcctcagccca

SEQ ID NO: 33080 - DNA, 21 bp, Artificial Sequence
  Description of Artificial Sequence: Synthetic oligonucleotide
aaaaacccaatgacagcacca

SEQ ID NO: 33081 - DNA, 21 bp, Artificial Sequence
  Description of Artificial Sequence: Synthetic oligonucleotide
aaaaacccacaagaaccaaca

SEQ ID NO: 33082 - DNA, 21 bp, Artificial Sequence
  Description of Artificial Sequence: Synthetic oligonucleotide
aaaaacccaagagacctcgga

SEQ ID NO: 33083 - DNA, 21 bp, Artificial Sequence
  Description of Artificial Sequence: Synthetic oligonucleotide
aaaaaccaaccactcggatac

SEQ ID NO: 33084 - DNA, 21 bp, Artificial Sequence
  Description of Artificial Sequence: Synthetic oligonucleotide
aaaaacagcacaagccaactc

SEQ ID NO: 33085 - DNA, 21 bp, Artificial Sequence
  Description of Artificial Sequence: Synthetic oligonucleotide
aaaaacgtcatgagcggagca

SEQ ID NO: 33086 - DNA, 21 bp, Artificial Sequence
  Description of Artificial Sequence: Synthetic oligonucleotide
aaaaactacagcgcagcagtc

SEQ ID NO: 33087 - DNA, 21 bp, Artificial Sequence
  Description of Artificial Sequence: Synthetic oligonucleotide
aaaccagcaggaacagacagc

SEQ ID NO: 33088 - DNA, 21 bp, Artificial Sequence
  Description of Artificial Sequence: Synthetic oligonucleotide
aaaccagcaagcaactacgac

SEQ ID NO: 33089 - DNA, 21 bp, Artificial Sequence
  Description of Artificial Sequence: Synthetic oligonucleotide
aaaccagcaacaagcccagga

SEQ ID NO: 33090 - DNA, 21 bp, Artificial Sequence
  Description of Artificial Sequence: Synthetic oligonucleotide
aaaccagcagtcccagtctac

SEQ ID NO: 33091 - DNA, 21 bp, Artificial Sequence
  Description of Artificial Sequence: Synthetic oligonucleotide
aaaccagacagaccaccagac

SEQ ID NO: 33092 - DNA, 21 bp, Artificial Sequence
  Description of Artificial Sequence: Synthetic oligonucleotide
aaaccagaaaacagccacagc

SEQ ID NO: 33093 - DNA, 21 bp, Artificial Sequence
  Description of Artificial Sequence: Synthetic oligonucleotide
aaaccattcgaaacaggaaga

SEQ ID NO: 33094 - DNA, 21 bp, Artificial Sequence
  Description of Artificial Sequence: Synthetic oligonucleotide
aaaccacacccaccaagcttc

SEQ ID NO: 33095 - DNA, 21 bp, Artificial Sequence
  Description of Artificial Sequence: Synthetic oligonucleotide
aaaccaatcctccaaagcagc

SEQ ID NO: 33096 - DNA, 21 bp, Artificial Sequence
  Description of Artificial Sequence: Synthetic oligonucleotide
aaaccactcgcacaactcagc

SEQ ID NO: 33097 - DNA, 21 bp, Artificial Sequence
  Description of Artificial Sequence: Synthetic oligonucleotide
aaaccactcgaccacctcaca

SEQ ID NO: 33098 - DNA, 21 bp, Artificial Sequence
  Description of Artificial Sequence: Synthetic oligonucleotide
aaaccactcgaagtcgaagga

SEQ ID NO: 33099 - DNA, 21 bp, Artificial Sequence
  Description of Artificial Sequence: Synthetic oligonucleotide
aaaccactccaagtcgaccca

SEQ ID NO: 33100 - DNA, 21 bp, Artificial Sequence
  Description of Artificial Sequence: Synthetic oligonucleotide
aaaccaatggcacacctcgaa

SEQ ID NO: 33101 - DNA, 21 bp, Artificial Sequence
  Description of Artificial Sequence: Synthetic oligonucleotide
aaaccaatggacccaacactc

SEQ ID NO: 33102 - DNA, 21 bp, Artificial Sequence
  Description of Artificial Sequence: Synthetic oligonucleotide
aaaccaatgagcatcacacca

SEQ ID NO: 33103 - DNA, 21 bp, Artificial Sequence
  Description of Artificial Sequence: Synthetic oligonucleotide
aaaccaaacgcagtcagcatg

SEQ ID NO: 33104 - DNA, 21 bp, Artificial Sequence
  Description of Artificial Sequence: Synthetic oligonucleotide
aaaccaccaatcctcacaagc

SEQ ID NO: 33105 - DNA, 21 bp, Artificial Sequence
  Description of Artificial Sequence: Synthetic oligonucleotide
aaaccaccactcgcacaagac

SEQ ID NO: 33106 - DNA, 21 bp, Artificial Sequence
  Description of Artificial Sequence: Synthetic oligonucleotide
aaaccaccaagagaagcagac

SEQ ID NO: 33107 - DNA, 21 bp, Artificial Sequence
  Description of Artificial Sequence: Synthetic oligonucleotide
aaaccaagagcaccaagcgac

SEQ ID NO: 33108 - DNA, 21 bp, Artificial Sequence
  Description of Artificial Sequence: Synthetic oligonucleotide
aaaccaagcggacacagcagc

SEQ ID NO: 33109 - DNA, 21 bp, Artificial Sequence
  Description of Artificial Sequence: Synthetic oligonucleotide
aaaccaagcggaccaccaaca

SEQ ID NO: 33110 - DNA, 21 bp, Artificial Sequence
  Description of Artificial Sequence: Synthetic oligonucleotide
aaaccaagcgtcccaacagtc

SEQ ID NO: 33111 - DNA, 21 bp, Artificial Sequence
  Description of Artificial Sequence: Synthetic oligonucleotide
aaaccaacaggaatgcacctc

SEQ ID NO: 33112 - DNA, 21 bp, Artificial Sequence
  Description of Artificial Sequence: Synthetic oligonucleotide
aaaccaacaccaacactcatg

SEQ ID NO: 33113 - DNA, 21 bp, Artificial Sequence
  Description of Artificial Sequence: Synthetic oligonucleotide
aaaccaacagtcatcccagca

SEQ ID NO: 33114 - DNA, 21 bp, Artificial Sequence
  Description of Artificial Sequence: Synthetic oligonucleotide
aaaccagtcggagaattcaca

SEQ ID NO: 33115 - DNA, 21 bp, Artificial Sequence
  Description of Artificial Sequence: Synthetic oligonucleotide
aaaccagtcccacaaccagac

SEQ ID NO: 33116 - DNA, 21 bp, Artificial Sequence
  Description of Artificial Sequence: Synthetic oligonucleotide
aaaccagtcacactcgacaac

SEQ ID NO: 33117 - DNA, 21 bp, Artificial Sequence
  Description of Artificial Sequence: Synthetic oligonucleotide
aaaccagtcacaccacacagc

SEQ ID NO: 33118 - DNA, 21 bp, Artificial Sequence
  Description of Artificial Sequence: Synthetic oligonucleotide
aaaccatacctcccagaaaac

SEQ ID NO: 33119 - DNA, 21 bp, Artificial Sequence
  Description of Artificial Sequence: Synthetic oligonucleotide
aaacaagcagacatcccaaga

SEQ ID NO: 33120 - DNA, 21 bp, Artificial Sequence
  Description of Artificial Sequence: Synthetic oligonucleotide
aaacaagcactcacaatgaca

SEQ ID NO: 33121 - DNA, 21 bp, Artificial Sequence
  Description of Artificial Sequence: Synthetic oligonucleotide
aaacaagacagagacagactc

SEQ ID NO: 33122 - DNA, 21 bp, Artificial Sequence
  Description of Artificial Sequence: Synthetic oligonucleotide
aaacaaggactcacaccaagc

SEQ ID NO: 33123 - DNA, 21 bp, Artificial Sequence
  Description of Artificial Sequence: Synthetic oligonucleotide
aaacaaggagtctggccaaac

SEQ ID NO: 33124 - DNA, 21 bp, Artificial Sequence
  Description of Artificial Sequence: Synthetic oligonucleotide
aaacaaatccaaccaaaaaac

SEQ ID NO: 33125 - DNA, 21 bp, Artificial Sequence
  Description of Artificial Sequence: Synthetic oligonucleotide
aaacaaaaacaccaattcgaa

SEQ ID NO: 33126 - DNA, 21 bp, Artificial Sequence
  Description of Artificial Sequence: Synthetic oligonucleotide
aaacaactcccaatcaacgtc

SEQ ID NO: 33127 - DNA, 21 bp, Artificial Sequence
  Description of Artificial Sequence: Synthetic oligonucleotide
aaacaaatgctcgacccaaca

SEQ ID NO: 33128 - DNA, 21 bp, Artificial Sequence
  Description of Artificial Sequence: Synthetic oligonucleotide
aaacaaatgaacgacctcgca

SEQ ID NO: 33129 - DNA, 21 bp, Artificial Sequence
  Description of Artificial Sequence: Synthetic oligonucleotide
aaacaaaacgtcatcaacaca

SEQ ID NO: 33130 - DNA, 21 bp, Artificial Sequence
  Description of Artificial Sequence: Synthetic oligonucleotide
aaacaaccaccacaaccacca

SEQ ID NO: 33131 - DNA, 21 bp, Artificial Sequence
  Description of Artificial Sequence: Synthetic oligonucleotide
aaacaaagagaacaaccaatg

SEQ ID NO: 33132 - DNA, 21 bp, Artificial Sequence
  Description of Artificial Sequence: Synthetic oligonucleotide
aaacaaagcagccacacaaca

SEQ ID NO: 33133 - DNA, 21 bp, Artificial Sequence
  Description of Artificial Sequence: Synthetic oligonucleotide
aaacaaagcagcacaagcatc

SEQ ID NO: 33134 - DNA, 21 bp, Artificial Sequence
  Description of Artificial Sequence: Synthetic oligonucleotide
aaacaaacaagcgtcacagga

SEQ ID NO: 33135 - DNA, 21 bp, Artificial Sequence
  Description of Artificial Sequence: Synthetic oligonucleotide
aaacaaacaacaccagtcctc

SEQ ID NO: 33136 - DNA, 21 bp, Artificial Sequence
  Description of Artificial Sequence: Synthetic oligonucleotide
aaacaagtcggaagcatgcca

SEQ ID NO: 33137 - DNA, 21 bp, Artificial Sequence
  Description of Artificial Sequence: Synthetic oligonucleotide
aaacaagtcagcagcgaaaga

SEQ ID NO: 33138 - DNA, 21 bp, Artificial Sequence
  Description of Artificial Sequence: Synthetic oligonucleotide
aaacaagtcgtcagcgtcaca

SEQ ID NO: 33139 - DNA, 21 bp, Artificial Sequence
  Description of Artificial Sequence: Synthetic oligonucleotide
aaacaatacagcagcagcgtc

SEQ ID NO: 33140 - DNA, 21 bp, Artificial Sequence
  Description of Artificial Sequence: Synthetic oligonucleotide
aaaagagcaaacgcaatccca

SEQ ID NO: 33141 - DNA, 21 bp, Artificial Sequence
  Description of Artificial Sequence: Synthetic oligonucleotide
aaaagagcagtcgcagcagaa

SEQ ID NO: 33142 - DNA, 21 bp, Artificial Sequence
  Description of Artificial Sequence: Synthetic oligonucleotide
aaaagagacgcagcaatgcca

SEQ ID NO: 33143 - DNA, 21 bp, Artificial Sequence
  Description of Artificial Sequence: Synthetic oligonucleotide
aaaagagacgacatgaacgtc

SEQ ID NO: 33144 - DNA, 21 bp, Artificial Sequence
  Description of Artificial Sequence: Synthetic oligonucleotide
aaaagagacatgggagcagga

SEQ ID NO: 33145 - DNA, 21 bp, Artificial Sequence
  Description of Artificial Sequence: Synthetic oligonucleotide
aaaagagacagcacaagccca

SEQ ID NO: 33146 - DNA, 21 bp, Artificial Sequence
  Description of Artificial Sequence: Synthetic oligonucleotide
aaaagagaattcgaaaacatc

SEQ ID NO: 33147 - DNA, 21 bp, Artificial Sequence
  Description of Artificial Sequence: Synthetic oligonucleotide
aaaagagaaagcatgccaatc

SEQ ID NO: 33148 - DNA, 21 bp, Artificial Sequence
  Description of Artificial Sequence: Synthetic oligonucleotide
aaaagagaagtcctcccaaca

SEQ ID NO: 33149 - DNA, 21 bp, Artificial Sequence
  Description of Artificial Sequence: Synthetic oligonucleotide
aaaagattcagcggagtcgaa

SEQ ID NO: 33150 - DNA, 21 bp, Artificial Sequence
  Description of Artificial Sequence: Synthetic oligonucleotide
aaaagacacgaaagcatgagc

SEQ ID NO: 33151 - DNA, 21 bp, Artificial Sequence
  Description of Artificial Sequence: Synthetic oligonucleotide
aaaagaaacagcctcaacgaa

SEQ ID NO: 33152 - DNA, 21 bp, Artificial Sequence
  Description of Artificial Sequence: Synthetic oligonucleotide
aaaagaccagcagaacacgac

SEQ ID NO: 33153 - DNA, 21 bp, Artificial Sequence
  Description of Artificial Sequence: Synthetic oligonucleotide
aaaagacaacacccagaaatc

SEQ ID NO: 33154 - DNA, 21 bp, Artificial Sequence
  Description of Artificial Sequence: Synthetic oligonucleotide
aaaagaagcctcgacagccca

SEQ ID NO: 33155 - DNA, 21 bp, Artificial Sequence
  Description of Artificial Sequence: Synthetic oligonucleotide
aaaagaagcctcacagaaaca

SEQ ID NO: 33156 - DNA, 21 bp, Artificial Sequence
  Description of Artificial Sequence: Synthetic oligonucleotide
aaaagaacagacggactcgga

SEQ ID NO: 33157 - DNA, 21 bp, Artificial Sequence
  Description of Artificial Sequence: Synthetic oligonucleotide
aaaagaacaagcgaaggagtc

SEQ ID NO: 33158 - DNA, 21 bp, Artificial Sequence
  Description of Artificial Sequence: Synthetic oligonucleotide
aaaagcgcagcaatcgcatac

SEQ ID NO: 33159 - DNA, 21 bp, Artificial Sequence
  Description of Artificial Sequence: Synthetic oligonucleotide
aaaagcgcagaagaaacaagc

SEQ ID NO: 33160 - DNA, 21 bp, Artificial Sequence
  Description of Artificial Sequence: Synthetic oligonucleotide
aaaagcgcactcatgggacca

SEQ ID NO: 33161 - DNA, 21 bp, Artificial Sequence
  Description of Artificial Sequence: Synthetic oligonucleotide
aaaagcgcaagcctcagcatg

SEQ ID NO: 33162 - DNA, 21 bp, Artificial Sequence
  Description of Artificial Sequence: Synthetic oligonucleotide
aaaagcgcaagctggagcgaa

SEQ ID NO: 33163 - DNA, 21 bp, Artificial Sequence
  Description of Artificial Sequence: Synthetic oligonucleotide
aaaagcgacatgccattcaac

SEQ ID NO: 33164 - DNA, 21 bp, Artificial Sequence
  Description of Artificial Sequence: Synthetic oligonucleotide
aaaagcgacccagaatggcca

SEQ ID NO: 33165 - DNA, 21 bp, Artificial Sequence
  Description of Artificial Sequence: Synthetic oligonucleotide
aaaagcgacgtcatgttccaa

SEQ ID NO: 33166 - DNA, 21 bp, Artificial Sequence
  Description of Artificial Sequence: Synthetic oligonucleotide
aaaagcgaaagatacgcagtc

SEQ ID NO: 33167 - DNA, 21 bp, Artificial Sequence
  Description of Artificial Sequence: Synthetic oligonucleotide
aaaagcttcccagtcgtccaa

SEQ ID NO: 33168 - DNA, 21 bp, Artificial Sequence
  Description of Artificial Sequence: Synthetic oligonucleotide
aaaagcttccaaagcacacca

SEQ ID NO: 33169 - DNA, 21 bp, Artificial Sequence
  Description of Artificial Sequence: Synthetic oligonucleotide
aaaagcggaccagtcacactc

SEQ ID NO: 33170 - DNA, 21 bp, Artificial Sequence
  Description of Artificial Sequence: Synthetic oligonucleotide
aaaagcggaacagcattcagc

SEQ ID NO: 33171 - DNA, 21 bp, Artificial Sequence
  Description of Artificial Sequence: Synthetic oligonucleotide
aaaagcggagtccaaagccca

SEQ ID NO: 33172 - DNA, 21 bp, Artificial Sequence
  Description of Artificial Sequence: Synthetic oligonucleotide
aaaagcatcgcaacaagcgga

SEQ ID NO: 33173 - DNA, 21 bp, Artificial Sequence
  Description of Artificial Sequence: Synthetic oligonucleotide
aaaagcatcgaattcttcgca

SEQ ID NO: 33174 - DNA, 21 bp, Artificial Sequence
  Description of Artificial Sequence: Synthetic oligonucleotide
aaaagcatcagagaagaccca

SEQ ID NO: 33175 - DNA, 21 bp, Artificial Sequence
  Description of Artificial Sequence: Synthetic oligonucleotide
aaaagcaaagacgtcagatac

SEQ ID NO: 33176 - DNA, 21 bp, Artificial Sequence
  Description of Artificial Sequence: Synthetic oligonucleotide
aaaagcatggacacaacagga

SEQ ID NO: 33177 - DNA, 21 bp, Artificial Sequence
  Description of Artificial Sequence: Synthetic oligonucleotide
aaaagcaacgcatgcctccac

SEQ ID NO: 33178 - DNA, 21 bp, Artificial Sequence
  Description of Artificial Sequence: Synthetic oligonucleotide
aaaagcaacgacagaacagac

SEQ ID NO: 33179 - DNA, 21 bp, Artificial Sequence
  Description of Artificial Sequence: Synthetic oligonucleotide
aaaagcaacacaccagcagca

SEQ ID NO: 33180 - DNA, 21 bp, Artificial Sequence
  Description of Artificial Sequence: Synthetic oligonucleotide
aaaagcaacacaacagcagac

SEQ ID NO: 33181 - DNA, 21 bp, Artificial Sequence
  Description of Artificial Sequence: Synthetic oligonucleotide
aaaagcccagcagaaatcgca

SEQ ID NO: 33182 - DNA, 21 bp, Artificial Sequence
  Description of Artificial Sequence: Synthetic oligonucleotide
aaaagcccagacggaatggtc

SEQ ID NO: 33183 - DNA, 21 bp, Artificial Sequence
  Description of Artificial Sequence: Synthetic oligonucleotide
aaaagcccagacagataccac

SEQ ID NO: 33184 - DNA, 21 bp, Artificial Sequence
  Description of Artificial Sequence: Synthetic oligonucleotide
aaaagcccaggagtcatggtc

SEQ ID NO: 33185 - DNA, 21 bp, Artificial Sequence
  Description of Artificial Sequence: Synthetic oligonucleotide
aaaagcccaagaacaccagaa

SEQ ID NO: 33186 - DNA, 21 bp, Artificial Sequence
  Description of Artificial Sequence: Synthetic oligonucleotide
aaaagcccaagccacgcagca

SEQ ID NO: 33187 - DNA, 21 bp, Artificial Sequence
  Description of Artificial Sequence: Synthetic oligonucleotide
aaaagcccaagcacattccac

SEQ ID NO: 33188 - DNA, 21 bp, Artificial Sequence
  Description of Artificial Sequence: Synthetic oligonucleotide
aaaagcccaacactcgcaagc

SEQ ID NO: 33189 - DNA, 21 bp, Artificial Sequence
  Description of Artificial Sequence: Synthetic oligonucleotide
aaaagcccagtcagagacaca

SEQ ID NO: 33190 - DNA, 21 bp, Artificial Sequence
  Description of Artificial Sequence: Synthetic oligonucleotide
aaaagcccagtcagcggaaac

SEQ ID NO: 33191 - DNA, 21 bp, Artificial Sequence
  Description of Artificial Sequence: Synthetic oligonucleotide
aaaagcccagtcagcagctac

SEQ ID NO: 33192 - DNA, 21 bp, Artificial Sequence
  Description of Artificial Sequence: Synthetic oligonucleotide
aaaagccaagcagaattcgga

SEQ ID NO: 33193 - DNA, 21 bp, Artificial Sequence
  Description of Artificial Sequence: Synthetic oligonucleotide
aaaagccaagcactcacagac

SEQ ID NO: 33194 - DNA, 21 bp, Artificial Sequence
  Description of Artificial Sequence: Synthetic oligonucleotide
aaaagccaaggaagccactac

SEQ ID NO: 33195 - DNA, 21 bp, Artificial Sequence
  Description of Artificial Sequence: Synthetic oligonucleotide
aaaagccaacactacccaagc

SEQ ID NO: 33196 - DNA, 21 bp, Artificial Sequence
  Description of Artificial Sequence: Synthetic oligonucleotide
aaaagccaaagcgacaaagtc

SEQ ID NO: 33197 - DNA, 21 bp, Artificial Sequence
  Description of Artificial Sequence: Synthetic oligonucleotide
aaaagccaaagcggaaacatg

SEQ ID NO: 33198 - DNA, 21 bp, Artificial Sequence
  Description of Artificial Sequence: Synthetic oligonucleotide
aaaagcagagacaacctcaac

SEQ ID NO: 33199 - DNA, 21 bp, Artificial Sequence
  Description of Artificial Sequence: Synthetic oligonucleotide
aaaagcagaaacctcgaacca

SEQ ID NO: 33200 - DNA, 21 bp, Artificial Sequence
  Description of Artificial Sequence: Synthetic oligonucleotide
aaaagcagaacaggaacagaa

SEQ ID NO: 33201 - DNA, 21 bp, Artificial Sequence
  Description of Artificial Sequence: Synthetic oligonucleotide
aaaagcagcgcacacgcatgg

SEQ ID NO: 33202 - DNA, 21 bp, Artificial Sequence
  Description of Artificial Sequence: Synthetic oligonucleotide
aaaagcagcgacatggtcgtc

SEQ ID NO: 33203 - DNA, 21 bp, Artificial Sequence
  Description of Artificial Sequence: Synthetic oligonucleotide
aaaagcagccacccaccagtc

SEQ ID NO: 33204 - DNA, 21 bp, Artificial Sequence
  Description of Artificial Sequence: Synthetic oligonucleotide
aaaagcagcccactcacaagc

SEQ ID NO: 33205 - DNA, 21 bp, Artificial Sequence
  Description of Artificial Sequence: Synthetic oligonucleotide
aaaagcagccaacaaagcatc

SEQ ID NO: 33206 - DNA, 21 bp, Artificial Sequence
  Description of Artificial Sequence: Synthetic oligonucleotide
aaaagcagcagcggagacaaa

SEQ ID NO: 33207 - DNA, 21 bp, Artificial Sequence
  Description of Artificial Sequence: Synthetic oligonucleotide
aaaagcagcagcggactcgaa

SEQ ID NO: 33208 - DNA, 21 bp, Artificial Sequence
  Description of Artificial Sequence: Synthetic oligonucleotide
aaaagcagcacagcaggagtc

SEQ ID NO: 33209 - DNA, 21 bp, Artificial Sequence
  Description of Artificial Sequence: Synthetic oligonucleotide
aaaagcagcacaagcggaaac

SEQ ID NO: 33210 - DNA, 21 bp, Artificial Sequence
  Description of Artificial Sequence: Synthetic oligonucleotide
aaaagcagctactacccagca

SEQ ID NO: 33211 - DNA, 21 bp, Artificial Sequence
  Description of Artificial Sequence: Synthetic oligonucleotide
aaaagcacacacgacgtccca

SEQ ID NO: 33212 - DNA, 21 bp, Artificial Sequence
  Description of Artificial Sequence: Synthetic oligonucleotide
aaaagcacaccaagagaagga

SEQ ID NO: 33213 - DNA, 21 bp, Artificial Sequence
  Description of Artificial Sequence: Synthetic oligonucleotide
aaaagcacaagcggaatgcca

SEQ ID NO: 33214 - DNA, 21 bp, Artificial Sequence
  Description of Artificial Sequence: Synthetic oligonucleotide
aaaagcacagtcccagacctc

SEQ ID NO: 33215 - DNA, 21 bp, Artificial Sequence
  Description of Artificial Sequence: Synthetic oligonucleotide
aaaagcacagtcacacacttc

SEQ ID NO: 33216 - DNA, 21 bp, Artificial Sequence
  Description of Artificial Sequence: Synthetic oligonucleotide
aaaagcgtcgcaatcagcgtc

SEQ ID NO: 33217 - DNA, 21 bp, Artificial Sequence
  Description of Artificial Sequence: Synthetic oligonucleotide
aaaagcgtcggactcagcagc

SEQ ID NO: 33218 - DNA, 21 bp, Artificial Sequence
  Description of Artificial Sequence: Synthetic oligonucleotide
aaaagcgtcctcgtcgaaagc

SEQ ID NO: 33219 - DNA, 21 bp, Artificial Sequence
  Description of Artificial Sequence: Synthetic oligonucleotide
aaaagctacaacagcccatac

SEQ ID NO: 33220 - DNA, 21 bp, Artificial Sequence
  Description of Artificial Sequence: Synthetic oligonucleotide
aaaagctacccaaacgaccac

SEQ ID NO: 33221 - DNA, 21 bp, Artificial Sequence
  Description of Artificial Sequence: Synthetic oligonucleotide
aaaagctacccaccagcactc

SEQ ID NO: 33222 - DNA, 21 bp, Artificial Sequence
  Description of Artificial Sequence: Synthetic oligonucleotide
aaaacagcagacgcaccaaga

SEQ ID NO: 33223 - DNA, 21 bp, Artificial Sequence
  Description of Artificial Sequence: Synthetic oligonucleotide
aaaacagcaagcctcggacca

SEQ ID NO: 33224 - DNA, 21 bp, Artificial Sequence
  Description of Artificial Sequence: Synthetic oligonucleotide
aaaacagcaagcatgccaaca

SEQ ID NO: 33225 - DNA, 21 bp, Artificial Sequence
  Description of Artificial Sequence: Synthetic oligonucleotide
aaaacagacagaacactccaa

SEQ ID NO: 33226 - DNA, 21 bp, Artificial Sequence
  Description of Artificial Sequence: Synthetic oligonucleotide
aaaacagacagcagagtccca

SEQ ID NO: 33227 - DNA, 21 bp, Artificial Sequence
  Description of Artificial Sequence: Synthetic oligonucleotide
aaaacagaattcagaaaccca

SEQ ID NO: 33228 - DNA, 21 bp, Artificial Sequence
  Description of Artificial Sequence: Synthetic oligonucleotide
aaaacagaaggaagcggatgg

SEQ ID NO: 33229 - DNA, 21 bp, Artificial Sequence
  Description of Artificial Sequence: Synthetic oligonucleotide
aaaacagaaagaacactcatc

SEQ ID NO: 33230 - DNA, 21 bp, Artificial Sequence
  Description of Artificial Sequence: Synthetic oligonucleotide
aaaacattcacagaaaaaaca

SEQ ID NO: 33231 - DNA, 21 bp, Artificial Sequence
  Description of Artificial Sequence: Synthetic oligonucleotide
aaaacaggaccaccaccagtc

SEQ ID NO: 33232 - DNA, 21 bp, Artificial Sequence
  Description of Artificial Sequence: Synthetic oligonucleotide
aaaacaggagtcagcagcgac

SEQ ID NO: 33233 - DNA, 21 bp, Artificial Sequence
  Description of Artificial Sequence: Synthetic oligonucleotide
aaaacacacggactctgcctc

SEQ ID NO: 33234 - DNA, 21 bp, Artificial Sequence
  Description of Artificial Sequence: Synthetic oligonucleotide
aaaacaatcatcacagacctc

SEQ ID NO: 33235 - DNA, 21 bp, Artificial Sequence
  Description of Artificial Sequence: Synthetic oligonucleotide
aaaacactcccactcccagaa

SEQ ID NO: 33236 - DNA, 21 bp, Artificial Sequence
  Description of Artificial Sequence: Synthetic oligonucleotide
aaaacaatgacaacagtccca

SEQ ID NO: 33237 - DNA, 21 bp, Artificial Sequence
  Description of Artificial Sequence: Synthetic oligonucleotide
aaaacaatggtcccagtcgtc

SEQ ID NO: 33238 - DNA, 21 bp, Artificial Sequence
  Description of Artificial Sequence: Synthetic oligonucleotide
aaaacaaacggacacaactac

SEQ ID NO: 33239 - DNA, 21 bp, Artificial Sequence
  Description of Artificial Sequence: Synthetic oligonucleotide
aaaacaaacccactcgcacaa

SEQ ID NO: 33240 - DNA, 21 bp, Artificial Sequence
  Description of Artificial Sequence: Synthetic oligonucleotide
aaaacaaacagcgaaatcatc

SEQ ID NO: 33241 - DNA, 21 bp, Artificial Sequence
  Description of Artificial Sequence: Synthetic oligonucleotide
aaaacaccagacccaaaaaaa

SEQ ID NO: 33242 - DNA, 21 bp, Artificial Sequence
  Description of Artificial Sequence: Synthetic oligonucleotide
aaaacaccaatggtcgaactc

SEQ ID NO: 33243 - DNA, 21 bp, Artificial Sequence
  Description of Artificial Sequence: Synthetic oligonucleotide
aaaacacaactcatgacaagc

SEQ ID NO: 33244 - DNA, 21 bp, Artificial Sequence
  Description of Artificial Sequence: Synthetic oligonucleotide
aaaacacaaccaggaagcgtc

SEQ ID NO: 33245 - DNA, 21 bp, Artificial Sequence
  Description of Artificial Sequence: Synthetic oligonucleotide
aaaacacaaagcatcctcagc

SEQ ID NO: 33246 - DNA, 21 bp, Artificial Sequence
  Description of Artificial Sequence: Synthetic oligonucleotide
aaaacaagcgaagtcagatgg

SEQ ID NO: 33247 - DNA, 21 bp, Artificial Sequence
  Description of Artificial Sequence: Synthetic oligonucleotide
aaaacaagccaaagccacaca

SEQ ID NO: 33248 - DNA, 21 bp, Artificial Sequence
  Description of Artificial Sequence: Synthetic oligonucleotide
aaaacaagcgtcacaagagac

SEQ ID NO: 33249 - DNA, 21 bp, Artificial Sequence
  Description of Artificial Sequence: Synthetic oligonucleotide
aaaacaacagcaccacacatc

SEQ ID NO: 33250 - DNA, 21 bp, Artificial Sequence
  Description of Artificial Sequence: Synthetic oligonucleotide
aaaacaacagacagaatccca

SEQ ID NO: 33251 - DNA, 21 bp, Artificial Sequence
  Description of Artificial Sequence: Synthetic oligonucleotide
aaaacaacactcatgacaagc

SEQ ID NO: 33252 - DNA, 21 bp, Artificial Sequence
  Description of Artificial Sequence: Synthetic oligonucleotide
aaaacaacaccagtcctcgtc

SEQ ID NO: 33253 - DNA, 21 bp, Artificial Sequence
  Description of Artificial Sequence: Synthetic oligonucleotide
aaaacaacacaaaacagcaac

SEQ ID NO: 33254 - DNA, 21 bp, Artificial Sequence
  Description of Artificial Sequence: Synthetic oligonucleotide
aaaacaacaagcaaaccacca

SEQ ID NO: 33255 - DNA, 21 bp, Artificial Sequence
  Description of Artificial Sequence: Synthetic oligonucleotide
aaaacagtcgcaatggaaaga

SEQ ID NO: 33256 - DNA, 21 bp, Artificial Sequence
  Description of Artificial Sequence: Synthetic oligonucleotide
aaaacagtcagagaaacaagc

SEQ ID NO: 33257 - DNA, 21 bp, Artificial Sequence
  Description of Artificial Sequence: Synthetic oligonucleotide
aaaacagtcacaaacgtcctc

SEQ ID NO: 33258 - DNA, 21 bp, Artificial Sequence
  Description of Artificial Sequence: Synthetic oligonucleotide
aaaacagtcgtcgcaaaccca

SEQ ID NO: 33259 - DNA, 21 bp, Artificial Sequence
  Description of Artificial Sequence: Synthetic oligonucleotide
aaaacatacggaacacacgca

SEQ ID NO: 33260 - DNA, 21 bp, Artificial Sequence
  Description of Artificial Sequence: Synthetic oligonucleotide
aaagtcgcactcgcaacactc

SEQ ID NO: 33261 - DNA, 21 bp, Artificial Sequence
  Description of Artificial Sequence: Synthetic oligonucleotide
aaagtcgcaatgccagtcctc

SEQ ID NO: 33262 - DNA, 21 bp, Artificial Sequence
  Description of Artificial Sequence: Synthetic oligonucleotide
aaagtcgcaacaagcacaatc

SEQ ID NO: 33263 - DNA, 21 bp, Artificial Sequence
  Description of Artificial Sequence: Synthetic oligonucleotide
aaagtcgacagcagagaacca

SEQ ID NO: 33264 - DNA, 21 bp, Artificial Sequence
  Description of Artificial Sequence: Synthetic oligonucleotide
aaagtcgacgtcctctacaac

SEQ ID NO: 33265 - DNA, 21 bp, Artificial Sequence
  Description of Artificial Sequence: Synthetic oligonucleotide
aaagtcgaaagcatggacagc

SEQ ID NO: 33266 - DNA, 21 bp, Artificial Sequence
  Description of Artificial Sequence: Synthetic oligonucleotide
aaagtcggagcaggaaacaca

SEQ ID NO: 33267 - DNA, 21 bp, Artificial Sequence
  Description of Artificial Sequence: Synthetic oligonucleotide
aaagtcggaaacaacgcatac

SEQ ID NO: 33268 - DNA, 21 bp, Artificial Sequence
  Description of Artificial Sequence: Synthetic oligonucleotide
aaagtcggaagcgtctacaca

SEQ ID NO: 33269 - DNA, 21 bp, Artificial Sequence
  Description of Artificial Sequence: Synthetic oligonucleotide
aaagtcctccaaccacaccca

SEQ ID NO: 33270 - DNA, 21 bp, Artificial Sequence
  Description of Artificial Sequence: Synthetic oligonucleotide
aaagtcaacatcacagcattc

SEQ ID NO: 33271 - DNA, 21 bp, Artificial Sequence
  Description of Artificial Sequence: Synthetic oligonucleotide
aaagtcaacctcttcgcagga

SEQ ID NO: 33272 - DNA, 21 bp, Artificial Sequence
  Description of Artificial Sequence: Synthetic oligonucleotide
aaagtcaacagcgtcgcattc

SEQ ID NO: 33273 - DNA, 21 bp, Artificial Sequence
  Description of Artificial Sequence: Synthetic oligonucleotide
aaagtccaagaaagaagccaa

SEQ ID NO: 33274 - DNA, 21 bp, Artificial Sequence
  Description of Artificial Sequence: Synthetic oligonucleotide
aaagtcagcgcagcactcagc

SEQ ID NO: 33275 - DNA, 21 bp, Artificial Sequence
  Description of Artificial Sequence: Synthetic oligonucleotide
aaagtcagcggactcagcatg

SEQ ID NO: 33276 - DNA, 21 bp, Artificial Sequence
  Description of Artificial Sequence: Synthetic oligonucleotide
aaagtcagcagaatcagcgac

SEQ ID NO: 33277 - DNA, 21 bp, Artificial Sequence
  Description of Artificial Sequence: Synthetic oligonucleotide
aaagtcagcagcacagtcgaa

SEQ ID NO: 33278 - DNA, 21 bp, Artificial Sequence
  Description of Artificial Sequence: Synthetic oligonucleotide
aaagtcacagcaccaaacgca

SEQ ID NO: 33279 - DNA, 21 bp, Artificial Sequence
  Description of Artificial Sequence: Synthetic oligonucleotide
aaagtcacaggaatgccagtc

SEQ ID NO: 33280 - DNA, 21 bp, Artificial Sequence
  Description of Artificial Sequence: Synthetic oligonucleotide
aaagtcacaggatacagcgaa

SEQ ID NO: 33281 - DNA, 21 bp, Artificial Sequence
  Description of Artificial Sequence: Synthetic oligonucleotide
aaagtcacaacaccactccca

SEQ ID NO: 33282 - DNA, 21 bp, Artificial Sequence
  Description of Artificial Sequence: Synthetic oligonucleotide
aaagtcgtcgcaccagcactc

SEQ ID NO: 33283 - DNA, 21 bp, Artificial Sequence
  Description of Artificial Sequence: Synthetic oligonucleotide
aaagtcgtcctcagagaagga

SEQ ID NO: 33284 - DNA, 21 bp, Artificial Sequence
  Description of Artificial Sequence: Synthetic oligonucleotide
aaagtcgtcacagcaccagaa

SEQ ID NO: 33285 - DNA, 21 bp, Artificial Sequence
  Description of Artificial Sequence: Synthetic oligonucleotide
aaatggacagacggaccagca

SEQ ID NO: 33286 - DNA, 21 bp, Artificial Sequence
  Description of Artificial Sequence: Synthetic oligonucleotide
aaatgggtcccagaaagccca

SEQ ID NO: 33287 - DNA, 21 bp, Artificial Sequence
  Description of Artificial Sequence: Synthetic oligonucleotide
aaatacgcacacagcccaaca

SEQ ID NO: 33288 - DNA, 21 bp, Artificial Sequence
  Description of Artificial Sequence: Synthetic oligonucleotide
aaatacgcaacaaacgcagca

SEQ ID NO: 33289 - DNA, 21 bp, Artificial Sequence
  Description of Artificial Sequence: Synthetic oligonucleotide
aaatacgacggaggacaacac

SEQ ID NO: 33290 - DNA, 21 bp, Artificial Sequence
  Description of Artificial Sequence: Synthetic oligonucleotide
aaatacggaagcacagtcgtc

SEQ ID NO: 33291 - DNA, 21 bp, Artificial Sequence
  Description of Artificial Sequence: Synthetic oligonucleotide
aaatacaaagacctcccagca

SEQ ID NO: 33292 - DNA, 21 bp, Artificial Sequence
  Description of Artificial Sequence: Synthetic oligonucleotide
aaatacccagcactcagcgca

SEQ ID NO: 33293 - DNA, 21 bp, Artificial Sequence
  Description of Artificial Sequence: Synthetic oligonucleotide
aaatacagagaaaacaacgtc

SEQ ID NO: 33294 - DNA, 21 bp, Artificial Sequence
  Description of Artificial Sequence: Synthetic oligonucleotide
aaatacagcaaaccagacaca

SEQ ID NO: 33295 - DNA, 21 bp, Artificial Sequence
  Description of Artificial Sequence: Synthetic oligonucleotide
aaatacacaggaagacaagaa

SEQ ID NO: 33296 - DNA, 21 bp, Artificial Sequence
  Description of Artificial Sequence: Synthetic oligonucleotide
aaatacacactcacaccaaac

SEQ ID NO: 33297 - DNA, 21 bp, Artificial Sequence
  Description of Artificial Sequence: Synthetic oligonucleotide
aaatacgtctgcggaccaaac

SEQ ID NO: 33298 - DNA, 21 bp, Artificial Sequence
  Description of Artificial Sequence: Synthetic oligonucleotide
aaatacgtcggaggaccaaac

SEQ ID NO: 33299 - DNA, 21 bp, Artificial Sequence
  Description of Artificial Sequence: Synthetic oligonucleotide
aaatacgtcaacggagtcgac

SEQ ID NO: 33300 - DNA, 21 bp, Artificial Sequence
  Description of Artificial Sequence: Synthetic oligonucleotide
aaatacgtcacaacaagccca

SEQ ID NO: 33301 - DNA, 21 bp, Artificial Sequence
  Description of Artificial Sequence: Synthetic oligonucleotide
ctcgcagcagacgtcagattc

SEQ ID NO: 33302 - DNA, 21 bp, Artificial Sequence
  Description of Artificial Sequence: Synthetic oligonucleotide
ctcgcagcaggatgcccagtc

SEQ ID NO: 33303 - DNA, 21 bp, Artificial Sequence
  Description of Artificial Sequence: Synthetic oligonucleotide
ctcgcagcaggaatcagattc

SEQ ID NO: 33304 - DNA, 21 bp, Artificial Sequence
  Description of Artificial Sequence: Synthetic oligonucleotide
ctcgcagcaaaaccactcatc

SEQ ID NO: 33305 - DNA, 21 bp, Artificial Sequence
  Description of Artificial Sequence: Synthetic oligonucleotide
ctcgcagcaaacggagcacac

SEQ ID NO: 33306 - DNA, 21 bp, Artificial Sequence
  Description of Artificial Sequence: Synthetic oligonucleotide
ctcgcagcaccaacaagcagc

SEQ ID NO: 33307 - DNA, 21 bp, Artificial Sequence
  Description of Artificial Sequence: Synthetic oligonucleotide
ctcgcagcacaagacaaagaa

SEQ ID NO: 33308 - DNA, 21 bp, Artificial Sequence
  Description of Artificial Sequence: Synthetic oligonucleotide
ctcgcagcaagaatgcaacca

SEQ ID NO: 33309 - DNA, 21 bp, Artificial Sequence
  Description of Artificial Sequence: Synthetic oligonucleotide
ctcgcagcaagaagaccagac

SEQ ID NO: 33310 - DNA, 21 bp, Artificial Sequence
  Description of Artificial Sequence: Synthetic oligonucleotide
ctcgcagcaagcagcagacca

SEQ ID NO: 33311 - DNA, 21 bp, Artificial Sequence
  Description of Artificial Sequence: Synthetic oligonucleotide
ctcgcagacaaaccagcaatg

SEQ ID NO: 33312 - DNA, 21 bp, Artificial Sequence
  Description of Artificial Sequence: Synthetic oligonucleotide
ctcgcagacatgctcaaaagc

SEQ ID NO: 33313 - DNA, 21 bp, Artificial Sequence
  Description of Artificial Sequence: Synthetic oligonucleotide
ctcgcagacagagaaaacaca

SEQ ID NO: 33314 - DNA, 21 bp, Artificial Sequence
  Description of Artificial Sequence: Synthetic oligonucleotide
ctcgcagacagaagaatcgaa

SEQ ID NO: 33315 - DNA, 21 bp, Artificial Sequence
  Description of Artificial Sequence: Synthetic oligonucleotide
ctcgcagaagcagtcacaagc

SEQ ID NO: 33316 - DNA, 21 bp, Artificial Sequence
  Description of Artificial Sequence: Synthetic oligonucleotide
ctcgcagaagaactcggaaga

SEQ ID NO: 33317 - DNA, 21 bp, Artificial Sequence
  Description of Artificial Sequence: Synthetic oligonucleotide
ctcgcagaaaacagcagaaca

SEQ ID NO: 33318 - DNA, 21 bp, Artificial Sequence
  Description of Artificial Sequence: Synthetic oligonucleotide
ctcgcagaaagcagaggatac

SEQ ID NO: 33319 - DNA, 21 bp, Artificial Sequence
  Description of Artificial Sequence: Synthetic oligonucleotide
ctcgcagaagtcatctacgac

SEQ ID NO: 33320 - DNA, 21 bp, Artificial Sequence
  Description of Artificial Sequence: Synthetic oligonucleotide
ctcgcaggagcactccaagaa

SEQ ID NO: 33321 - DNA, 21 bp, Artificial Sequence
  Description of Artificial Sequence: Synthetic oligonucleotide
ctcgcaggagacagacaatgg

SEQ ID NO: 33322 - DNA, 21 bp, Artificial Sequence
  Description of Artificial Sequence: Synthetic oligonucleotide
ctcgcaggacacctcatgcca

SEQ ID NO: 33323 - DNA, 21 bp, Artificial Sequence
  Description of Artificial Sequence: Synthetic oligonucleotide
ctcgcaggaaaaggactcctc

SEQ ID NO: 33324 - DNA, 21 bp, Artificial Sequence
  Description of Artificial Sequence: Synthetic oligonucleotide
ctcgcaggaaaaaacatcgca

SEQ ID NO: 33325 - DNA, 21 bp, Artificial Sequence
  Description of Artificial Sequence: Synthetic oligonucleotide
ctcgcaggactcggacacctc

SEQ ID NO: 33326 - DNA, 21 bp, Artificial Sequence
  Description of Artificial Sequence: Synthetic oligonucleotide
ctcgcaggactcgtcagaaac

SEQ ID NO: 33327 - DNA, 21 bp, Artificial Sequence
  Description of Artificial Sequence: Synthetic oligonucleotide
ctcgcacacggaacaggactc

SEQ ID NO: 33328 - DNA, 21 bp, Artificial Sequence
  Description of Artificial Sequence: Synthetic oligonucleotide
ctcgcacacaaagcaaacagc

SEQ ID NO: 33329 - DNA, 21 bp, Artificial Sequence
  Description of Artificial Sequence: Synthetic oligonucleotide
ctcgcacacaaaggaatcgtc

SEQ ID NO: 33330 - DNA, 21 bp, Artificial Sequence
  Description of Artificial Sequence: Synthetic oligonucleotide
ctcgcacacccagtccaattc

SEQ ID NO: 33331 - DNA, 21 bp, Artificial Sequence
  Description of Artificial Sequence: Synthetic oligonucleotide
ctcgcacacagcacaagcgtc

SEQ ID NO: 33332 - DNA, 21 bp, Artificial Sequence
  Description of Artificial Sequence: Synthetic oligonucleotide
ctcgcaatcgacccagcagac

SEQ ID NO: 33333 - DNA, 21 bp, Artificial Sequence
  Description of Artificial Sequence: Synthetic oligonucleotide
ctcgcaatcggaccactcaga

SEQ ID NO: 33334 - DNA, 21 bp, Artificial Sequence
  Description of Artificial Sequence: Synthetic oligonucleotide
ctcgcaaaattcgcaccagac

SEQ ID NO: 33335 - DNA, 21 bp, Artificial Sequence
  Description of Artificial Sequence: Synthetic oligonucleotide
ctcgcaaaaagcctccaagca

SEQ ID NO: 33336 - DNA, 21 bp, Artificial Sequence
  Description of Artificial Sequence: Synthetic oligonucleotide
ctcgcactcgcaggaagcgac

SEQ ID NO: 33337 - DNA, 21 bp, Artificial Sequence
  Description of Artificial Sequence: Synthetic oligonucleotide
ctcgcactcggagtcctcaga

SEQ ID NO: 33338 - DNA, 21 bp, Artificial Sequence
  Description of Artificial Sequence: Synthetic oligonucleotide
ctcgcactcggagtcccatac

SEQ ID NO: 33339 - DNA, 21 bp, Artificial Sequence
  Description of Artificial Sequence: Synthetic oligonucleotide
ctcgcactcaaaatcagcagc

SEQ ID NO: 33340 - DNA, 21 bp, Artificial Sequence
  Description of Artificial Sequence: Synthetic oligonucleotide
ctcgcactcaaaagccaccca

SEQ ID NO: 33341 - DNA, 21 bp, Artificial Sequence
  Description of Artificial Sequence: Synthetic oligonucleotide
ctcgcactcaaaagcagagac

SEQ ID NO: 33342 - DNA, 21 bp, Artificial Sequence
  Description of Artificial Sequence: Synthetic oligonucleotide
ctcgcactcccagcacacgca

SEQ ID NO: 33343 - DNA, 21 bp, Artificial Sequence
  Description of Artificial Sequence: Synthetic oligonucleotide
ctcgcactcagaggaccagga

SEQ ID NO: 33344 - DNA, 21 bp, Artificial Sequence
  Description of Artificial Sequence: Synthetic oligonucleotide
ctcgcactcagcggaaacaca

SEQ ID NO: 33345 - DNA, 21 bp, Artificial Sequence
  Description of Artificial Sequence: Synthetic oligonucleotide
ctcgcactcgtcacagacaga

SEQ ID NO: 33346 - DNA, 21 bp, Artificial Sequence
  Description of Artificial Sequence: Synthetic oligonucleotide
ctcgcaatgggaggaatcaga

SEQ ID NO: 33347 - DNA, 21 bp, Artificial Sequence
  Description of Artificial Sequence: Synthetic oligonucleotide
ctcgcaatgcaaagcagaaac

SEQ ID NO: 33348 - DNA, 21 bp, Artificial Sequence
  Description of Artificial Sequence: Synthetic oligonucleotide
ctcgcaaacggaaacccagca

SEQ ID NO: 33349 - DNA, 21 bp, Artificial Sequence
  Description of Artificial Sequence: Synthetic oligonucleotide
ctcgcaaacatcgcaacaaaa

SEQ ID NO: 33350 - DNA, 21 bp, Artificial Sequence
  Description of Artificial Sequence: Synthetic oligonucleotide
ctcgcaaacaaaatcccacca

SEQ ID NO: 33351 - DNA, 21 bp, Artificial Sequence
  Description of Artificial Sequence: Synthetic oligonucleotide
ctcgcaaacaaaagcatgagc

SEQ ID NO: 33352 - DNA, 21 bp, Artificial Sequence
  Description of Artificial Sequence: Synthetic oligonucleotide
ctcgcaaacccagcaaacgga

SEQ ID NO: 33353 - DNA, 21 bp, Artificial Sequence
  Description of Artificial Sequence: Synthetic oligonucleotide
ctcgcaaacccactcggaaga

SEQ ID NO: 33354 - DNA, 21 bp, Artificial Sequence
  Description of Artificial Sequence: Synthetic oligonucleotide
ctcgcaaacccaatgagcgca

SEQ ID NO: 33355 - DNA, 21 bp, Artificial Sequence
  Description of Artificial Sequence: Synthetic oligonucleotide
ctcgcaaacagcttcgtcgca

SEQ ID NO: 33356 - DNA, 21 bp, Artificial Sequence
  Description of Artificial Sequence: Synthetic oligonucleotide
ctcgcaaacagcaaaagcctc

SEQ ID NO: 33357 - DNA, 21 bp, Artificial Sequence
  Description of Artificial Sequence: Synthetic oligonucleotide
ctcgcaaacgtcagagcaagc

SEQ ID NO: 33358 - DNA, 21 bp, Artificial Sequence
  Description of Artificial Sequence: Synthetic oligonucleotide
ctcgcaccaggactcgcaatg

SEQ ID NO: 33359 - DNA, 21 bp, Artificial Sequence
  Description of Artificial Sequence: Synthetic oligonucleotide
ctcgcaccacacacaagcagc

SEQ ID NO: 33360 - DNA, 21 bp, Artificial Sequence
  Description of Artificial Sequence: Synthetic oligonucleotide
ctcgcaccactcagcaaagtc

SEQ ID NO: 33361 - DNA, 21 bp, Artificial Sequence
  Description of Artificial Sequence: Synthetic oligonucleotide
ctcgcaccaccactcagacaa

SEQ ID NO: 33362 - DNA, 21 bp, Artificial Sequence
  Description of Artificial Sequence: Synthetic oligonucleotide
ctcgcaccaagctacctccca

SEQ ID NO: 33363 - DNA, 21 bp, Artificial Sequence
  Description of Artificial Sequence: Synthetic oligonucleotide
ctcgcaccaacactcacacca

SEQ ID NO: 33364 - DNA, 21 bp, Artificial Sequence
  Description of Artificial Sequence: Synthetic oligonucleotide
ctcgcacaaggaagcatcagc

SEQ ID NO: 33365 - DNA, 21 bp, Artificial Sequence
  Description of Artificial Sequence: Synthetic oligonucleotide
ctcgcacaacaaaaagacaca

SEQ ID NO: 33366 - DNA, 21 bp, Artificial Sequence
  Description of Artificial Sequence: Synthetic oligonucleotide
ctcgcacaaagaccacaccaa

SEQ ID NO: 33367 - DNA, 21 bp, Artificial Sequence
  Description of Artificial Sequence: Synthetic oligonucleotide
ctcgcacaaagcagcagcaga

SEQ ID NO: 33368 - DNA, 21 bp, Artificial Sequence
  Description of Artificial Sequence: Synthetic oligonucleotide
ctcgcacaagtcagcgcaagc

SEQ ID NO: 33369 - DNA, 21 bp, Artificial Sequence
  Description of Artificial Sequence: Synthetic oligonucleotide
ctcgcaagaggaccaggagac

SEQ ID NO: 33370 - DNA, 21 bp, Artificial Sequence
  Description of Artificial Sequence: Synthetic oligonucleotide
ctcgcaagactcagcccaaca

SEQ ID NO: 33371 - DNA, 21 bp, Artificial Sequence
  Description of Artificial Sequence: Synthetic oligonucleotide
ctcgcaagacaaagcccagaa

SEQ ID NO: 33372 - DNA, 21 bp, Artificial Sequence
  Description of Artificial Sequence: Synthetic oligonucleotide
ctcgcaagacaaacaagcagc

SEQ ID NO: 33373 - DNA, 21 bp, Artificial Sequence
  Description of Artificial Sequence: Synthetic oligonucleotide
ctcgcaagaagcccaacactc

SEQ ID NO: 33374 - DNA, 21 bp, Artificial Sequence
  Description of Artificial Sequence: Synthetic oligonucleotide
ctcgcaagagtcaacagcagc

SEQ ID NO: 33375 - DNA, 21 bp, Artificial Sequence
  Description of Artificial Sequence: Synthetic oligonucleotide
ctcgcaagagtcagccaaaca

SEQ ID NO: 33376 - DNA, 21 bp, Artificial Sequence
  Description of Artificial Sequence: Synthetic oligonucleotide
ctcgcaagcgcaatgaaaaca

SEQ ID NO: 33377 - DNA, 21 bp, Artificial Sequence
  Description of Artificial Sequence: Synthetic oligonucleotide
ctcgcaagcgcagtccaaagc

SEQ ID NO: 33378 - DNA, 21 bp, Artificial Sequence
  Description of Artificial Sequence: Synthetic oligonucleotide
ctcgcaagcgacagcagagca

SEQ ID NO: 33379 - DNA, 21 bp, Artificial Sequence
  Description of Artificial Sequence: Synthetic oligonucleotide
ctcgcaagcgaattcatcgca

SEQ ID NO: 33380 - DNA, 21 bp, Artificial Sequence
  Description of Artificial Sequence: Synthetic oligonucleotide
ctcgcaagcgaaaaagtcagc

SEQ ID NO: 33381 - DNA, 21 bp, Artificial Sequence
  Description of Artificial Sequence: Synthetic oligonucleotide
ctcgcaagcctcgtcagcgtc

SEQ ID NO: 33382 - DNA, 21 bp, Artificial Sequence
  Description of Artificial Sequence: Synthetic oligonucleotide
ctcgcaagcccaacagactac

SEQ ID NO: 33383 - DNA, 21 bp, Artificial Sequence
  Description of Artificial Sequence: Synthetic oligonucleotide
ctcgcaagccaaggattcaac

SEQ ID NO: 33384 - DNA, 21 bp, Artificial Sequence
  Description of Artificial Sequence: Synthetic oligonucleotide
ctcgcaagccaaggaccagga

SEQ ID NO: 33385 - DNA, 21 bp, Artificial Sequence
  Description of Artificial Sequence: Synthetic oligonucleotide
ctcgcaagcagaccagcacac

SEQ ID NO: 33386 - DNA, 21 bp, Artificial Sequence
  Description of Artificial Sequence: Synthetic oligonucleotide
ctcgcaagcgtcaacacaagc

SEQ ID NO: 33387 - DNA, 21 bp, Artificial Sequence
  Description of Artificial Sequence: Synthetic oligonucleotide
ctcgcaacagcacacagacca

SEQ ID NO: 33388 - DNA, 21 bp, Artificial Sequence
  Description of Artificial Sequence: Synthetic oligonucleotide
ctcgcaacagcagtcgtcgac

SEQ ID NO: 33389 - DNA, 21 bp, Artificial Sequence
  Description of Artificial Sequence: Synthetic oligonucleotide
ctcgcaacaaaaagctacaca

SEQ ID NO: 33390 - DNA, 21 bp, Artificial Sequence
  Description of Artificial Sequence: Synthetic oligonucleotide
ctcgcaacaccaccaatcatc

SEQ ID NO: 33391 - DNA, 21 bp, Artificial Sequence
  Description of Artificial Sequence: Synthetic oligonucleotide
ctcgcaacaagacaagtcgga

SEQ ID NO: 33392 - DNA, 21 bp, Artificial Sequence
  Description of Artificial Sequence: Synthetic oligonucleotide
ctcgcaacaagagtcagagaa

SEQ ID NO: 33393 - DNA, 21 bp, Artificial Sequence
  Description of Artificial Sequence: Synthetic oligonucleotide
ctcgcaacaagcccactccac

SEQ ID NO: 33394 - DNA, 21 bp, Artificial Sequence
  Description of Artificial Sequence: Synthetic oligonucleotide
ctcgcaacaagcccaaaccac

SEQ ID NO: 33395 - DNA, 21 bp, Artificial Sequence
  Description of Artificial Sequence: Synthetic oligonucleotide
ctcgcaacaagcagaagcctc

SEQ ID NO: 33396 - DNA, 21 bp, Artificial Sequence
  Description of Artificial Sequence: Synthetic oligonucleotide
ctcgcaacaacaagcggagca

SEQ ID NO: 33397 - DNA, 21 bp, Artificial Sequence
  Description of Artificial Sequence: Synthetic oligonucleotide
ctcgcagtcgaaaaactccca

SEQ ID NO: 33398 - DNA, 21 bp, Artificial Sequence
  Description of Artificial Sequence: Synthetic oligonucleotide
ctcgcagtcggaacaaaagga

SEQ ID NO: 33399 - DNA, 21 bp, Artificial Sequence
  Description of Artificial Sequence: Synthetic oligonucleotide
ctcgcagtcagcccaatgcca

SEQ ID NO: 33400 - DNA, 21 bp, Artificial Sequence
  Description of Artificial Sequence: Synthetic oligonucleotide
ctcgcagtcgtcgaaagcctc

SEQ ID NO: 33401 - DNA, 21 bp, Artificial Sequence
  Description of Artificial Sequence: Synthetic oligonucleotide
ctctgcagaaacagccacagc

SEQ ID NO: 33402 - DNA, 21 bp, Artificial Sequence
  Description of Artificial Sequence: Synthetic oligonucleotide
ctcgacgcaagaagattcttc

SEQ ID NO: 33403 - DNA, 21 bp, Artificial Sequence
  Description of Artificial Sequence: Synthetic oligonucleotide
ctcgacgacccaggaggatgc

SEQ ID NO: 33404 - DNA, 21 bp, Artificial Sequence
  Description of Artificial Sequence: Synthetic oligonucleotide
ctcgacgacagcagcctcctc

SEQ ID NO: 33405 - DNA, 21 bp, Artificial Sequence
  Description of Artificial Sequence: Synthetic oligonucleotide
ctcgacgacgtcatgccagga

SEQ ID NO: 33406 - DNA, 21 bp, Artificial Sequence
  Description of Artificial Sequence: Synthetic oligonucleotide
ctcgacgaaagatggccaaca

SEQ ID NO: 33407 - DNA, 21 bp, Artificial Sequence
  Description of Artificial Sequence: Synthetic oligonucleotide
ctcgacttcccagcaagcagc

SEQ ID NO: 33408 - DNA, 21 bp, Artificial Sequence
  Description of Artificial Sequence: Synthetic oligonucleotide
ctcgacttcagagaagacagc

SEQ ID NO: 33409 - DNA, 21 bp, Artificial Sequence
  Description of Artificial Sequence: Synthetic oligonucleotide
ctcgacggaggaagcacaaga

SEQ ID NO: 33410 - DNA, 21 bp, Artificial Sequence
  Description of Artificial Sequence: Synthetic oligonucleotide
ctcgacggacaaatgctcgca

SEQ ID NO: 33411 - DNA, 21 bp, Artificial Sequence
  Description of Artificial Sequence: Synthetic oligonucleotide
ctcgacggaagaccactcgtc

SEQ ID NO: 33412 - DNA, 21 bp, Artificial Sequence
  Description of Artificial Sequence: Synthetic oligonucleotide
ctcgacatcgaaagacacagc

SEQ ID NO: 33413 - DNA, 21 bp, Artificial Sequence
  Description of Artificial Sequence: Synthetic oligonucleotide
ctcgacatcacaaacgtcaaa

SEQ ID NO: 33414 - DNA, 21 bp, Artificial Sequence
  Description of Artificial Sequence: Synthetic oligonucleotide
ctcgacaaattcaacagcaaa

SEQ ID NO: 33415 - DNA, 21 bp, Artificial Sequence
  Description of Artificial Sequence: Synthetic oligonucleotide
ctcgacaaaaaacaccaaagc

SEQ ID NO: 33416 - DNA, 21 bp, Artificial Sequence
  Description of Artificial Sequence: Synthetic oligonucleotide
ctcgacaaaatgagaacaaca

SEQ ID NO: 33417 - DNA, 21 bp, Artificial Sequence
  Description of Artificial Sequence: Synthetic oligonucleotide
ctcgacaaaagagacatcctc

SEQ ID NO: 33418 - DNA, 21 bp, Artificial Sequence
  Description of Artificial Sequence: Synthetic oligonucleotide
ctcgacaaaacaagcagactc

SEQ ID NO: 33419 - DNA, 21 bp, Artificial Sequence
  Description of Artificial Sequence: Synthetic oligonucleotide
ctcgacctcgcaaacagcatg

SEQ ID NO: 33420 - DNA, 21 bp, Artificial Sequence
  Description of Artificial Sequence: Synthetic oligonucleotide
ctcgacctccacctccaagca

SEQ ID NO: 33421 - DNA, 21 bp, Artificial Sequence
  Description of Artificial Sequence: Synthetic oligonucleotide
ctcgacctcaaaagcgtcatg

SEQ ID NO: 33422 - DNA, 21 bp, Artificial Sequence
  Description of Artificial Sequence: Synthetic oligonucleotide
ctcgacctccaaacaacaaaa

SEQ ID NO: 33423 - DNA, 21 bp, Artificial Sequence
  Description of Artificial Sequence: Synthetic oligonucleotide
ctcgacctcgtcgcattcgaa

SEQ ID NO: 33424 - DNA, 21 bp, Artificial Sequence
  Description of Artificial Sequence: Synthetic oligonucleotide
ctcgacatgagagacagcgga

SEQ ID NO: 33425 - DNA, 21 bp, Artificial Sequence
  Description of Artificial Sequence: Synthetic oligonucleotide
ctcgacatgagaacacaagga

SEQ ID NO: 33426 - DNA, 21 bp, Artificial Sequence
  Description of Artificial Sequence: Synthetic oligonucleotide
ctcgacaacccacaccacgtc

SEQ ID NO: 33427 - DNA, 21 bp, Artificial Sequence
  Description of Artificial Sequence: Synthetic oligonucleotide
ctcgacaacccagtcagcgca

SEQ ID NO: 33428 - DNA, 21 bp, Artificial Sequence
  Description of Artificial Sequence: Synthetic oligonucleotide
ctcgacccagacgcaagaaga

SEQ ID NO: 33429 - DNA, 21 bp, Artificial Sequence
  Description of Artificial Sequence: Synthetic oligonucleotide
ctcgacccaggactcaaaagc

SEQ ID NO: 33430 - DNA, 21 bp, Artificial Sequence
  Description of Artificial Sequence: Synthetic oligonucleotide
ctcgacagactcagcagcatc

SEQ ID NO: 33431 - DNA, 21 bp, Artificial Sequence
  Description of Artificial Sequence: Synthetic oligonucleotide
ctcgacagactcgtcacagga

SEQ ID NO: 33432 - DNA, 21 bp, Artificial Sequence
  Description of Artificial Sequence: Synthetic oligonucleotide
ctcgacagaatggtcgtcgga

SEQ ID NO: 33433 - DNA, 21 bp, Artificial Sequence
  Description of Artificial Sequence: Synthetic oligonucleotide
ctcgacagaccaagcgcatgg

SEQ ID NO: 33434 - DNA, 21 bp, Artificial Sequence
  Description of Artificial Sequence: Synthetic oligonucleotide
ctcgacagaagaccaatccaa

SEQ ID NO: 33435 - DNA, 21 bp, Artificial Sequence
  Description of Artificial Sequence: Synthetic oligonucleotide
ctcgacagaagaccaatgctc

SEQ ID NO: 33436 - DNA, 21 bp, Artificial Sequence
  Description of Artificial Sequence: Synthetic oligonucleotide
ctcgacagatacacaccacca

SEQ ID NO: 33437 - DNA, 21 bp, Artificial Sequence
  Description of Artificial Sequence: Synthetic oligonucleotide
ctcgacagcggaagaccaagc

SEQ ID NO: 33438 - DNA, 21 bp, Artificial Sequence
  Description of Artificial Sequence: Synthetic oligonucleotide
ctcgacagcctccacatccca

SEQ ID NO: 33439 - DNA, 21 bp, Artificial Sequence
  Description of Artificial Sequence: Synthetic oligonucleotide
ctcgacagcaacgtcacaagc

SEQ ID NO: 33440 - DNA, 21 bp, Artificial Sequence
  Description of Artificial Sequence: Synthetic oligonucleotide
ctcgacagcccagcaatggca

SEQ ID NO: 33441 - DNA, 21 bp, Artificial Sequence
  Description of Artificial Sequence: Synthetic oligonucleotide
ctcgacagcccaccaaacaac

SEQ ID NO: 33442 - DNA, 21 bp, Artificial Sequence
  Description of Artificial Sequence: Synthetic oligonucleotide
ctcgacagcagccacggacac

SEQ ID NO: 33443 - DNA, 21 bp, Artificial Sequence
  Description of Artificial Sequence: Synthetic oligonucleotide
ctcgacagcagcagaagcagc

SEQ ID NO: 33444 - DNA, 21 bp, Artificial Sequence
  Description of Artificial Sequence: Synthetic oligonucleotide
ctcgacagcagctggacacca

SEQ ID NO: 33445 - DNA, 21 bp, Artificial Sequence
  Description of Artificial Sequence: Synthetic oligonucleotide
ctcgacagcacaccaagacca

SEQ ID NO: 33446 - DNA, 21 bp, Artificial Sequence
  Description of Artificial Sequence: Synthetic oligonucleotide
ctcgacacacaagcaggaaga

SEQ ID NO: 33447 - DNA, 21 bp, Artificial Sequence
  Description of Artificial Sequence: Synthetic oligonucleotide
ctcgacacacaaagcagactc

SEQ ID NO: 33448 - DNA, 21 bp, Artificial Sequence
  Description of Artificial Sequence: Synthetic oligonucleotide
ctcgacacaagaggaatcagc

SEQ ID NO: 33449 - DNA, 21 bp, Artificial Sequence
  Description of Artificial Sequence: Synthetic oligonucleotide
ctcgacacaagatacagatac

SEQ ID NO: 33450 - DNA, 21 bp, Artificial Sequence
  Description of Artificial Sequence: Synthetic oligonucleotide
ctcgacacagtccaaagcaaa

SEQ ID NO: 33451 - DNA, 21 bp, Artificial Sequence
  Description of Artificial Sequence: Synthetic oligonucleotide
ctcgacgtcgcaacaagcaga

SEQ ID NO: 33452 - DNA, 21 bp, Artificial Sequence
  Description of Artificial Sequence: Synthetic oligonucleotide
ctcgacgtcaaatgcgaccca

SEQ ID NO: 33453 - DNA, 21 bp, Artificial Sequence
  Description of Artificial Sequence: Synthetic oligonucleotide
ctcgacgtcctcgactgcaaa

SEQ ID NO: 33454 - DNA, 21 bp, Artificial Sequence
  Description of Artificial Sequence: Synthetic oligonucleotide
ctcgacgtcaacggactcaga

SEQ ID NO: 33455 - DNA, 21 bp, Artificial Sequence
  Description of Artificial Sequence: Synthetic oligonucleotide
ctcgacgtcagccaaagactc

SEQ ID NO: 33456 - DNA, 21 bp, Artificial Sequence
  Description of Artificial Sequence: Synthetic oligonucleotide
ctcgacgtcgtcacaagagtc

SEQ ID NO: 33457 - DNA, 21 bp, Artificial Sequence
  Description of Artificial Sequence: Synthetic oligonucleotide
ctcgacgtctacagcagagaa

SEQ ID NO: 33458 - DNA, 21 bp, Artificial Sequence
  Description of Artificial Sequence: Synthetic oligonucleotide
ctcgaagcaaacctcaaagtc

SEQ ID NO: 33459 - DNA, 21 bp, Artificial Sequence
  Description of Artificial Sequence: Synthetic oligonucleotide
ctcgaagcaccaagagcaaca

SEQ ID NO: 33460 - DNA, 21 bp, Artificial Sequence
  Description of Artificial Sequence: Synthetic oligonucleotide
ctcgaagaagacaaagtcaaa

SEQ ID NO: 33461 - DNA, 21 bp, Artificial Sequence
  Description of Artificial Sequence: Synthetic oligonucleotide
ctcgaattcgacagcaaagaa

SEQ ID NO: 33462 - DNA, 21 bp, Artificial Sequence
  Description of Artificial Sequence: Synthetic oligonucleotide
ctcgaattcggaagcgaccaa

SEQ ID NO: 33463 - DNA, 21 bp, Artificial Sequence
  Description of Artificial Sequence: Synthetic oligonucleotide
ctcgaattcacaagaatcgga

SEQ ID NO: 33464 - DNA, 21 bp, Artificial Sequence
  Description of Artificial Sequence: Synthetic oligonucleotide
ctcgaaggaacaagaagagac

SEQ ID NO: 33465 - DNA, 21 bp, Artificial Sequence
  Description of Artificial Sequence: Synthetic oligonucleotide
ctcgaaggagtcagaggaagc

SEQ ID NO: 33466 - DNA, 21 bp, Artificial Sequence
  Description of Artificial Sequence: Synthetic oligonucleotide
ctcgaacacctcagaagcgca

SEQ ID NO: 33467 - DNA, 21 bp, Artificial Sequence
  Description of Artificial Sequence: Synthetic oligonucleotide
ctcgaacacagcgcacacgtc

SEQ ID NO: 33468 - DNA, 21 bp, Artificial Sequence
  Description of Artificial Sequence: Synthetic oligonucleotide
ctcgaacacagcgtcagcctc

SEQ ID NO: 33469 - DNA, 21 bp, Artificial Sequence
  Description of Artificial Sequence: Synthetic oligonucleotide
ctcgaaatcacaggaccagga

SEQ ID NO: 33470 - DNA, 21 bp, Artificial Sequence
  Description of Artificial Sequence: Synthetic oligonucleotide
ctcgaaaaaatgggactctac

SEQ ID NO: 33471 - DNA, 21 bp, Artificial Sequence
  Description of Artificial Sequence: Synthetic oligonucleotide
ctcgaaaaacaaacaggagac

SEQ ID NO: 33472 - DNA, 21 bp, Artificial Sequence
  Description of Artificial Sequence: Synthetic oligonucleotide
ctcgaactcaaaccagcaaac

SEQ ID NO: 33473 - DNA, 21 bp, Artificial Sequence
  Description of Artificial Sequence: Synthetic oligonucleotide
ctcgaaatgagaggactcgca

SEQ ID NO: 33474 - DNA, 21 bp, Artificial Sequence
  Description of Artificial Sequence: Synthetic oligonucleotide
ctcgaaaacgcacaaacacca

SEQ ID NO: 33475 - DNA, 21 bp, Artificial Sequence
  Description of Artificial Sequence: Synthetic oligonucleotide
ctcgaaaacgactggagagtc

SEQ ID NO: 33476 - DNA, 21 bp, Artificial Sequence
  Description of Artificial Sequence: Synthetic oligonucleotide
ctcgaaaaccacccagacaga

SEQ ID NO: 33477 - DNA, 21 bp, Artificial Sequence
  Description of Artificial Sequence: Synthetic oligonucleotide
ctcgaaaacaacccagcactc

SEQ ID NO: 33478 - DNA, 21 bp, Artificial Sequence
  Description of Artificial Sequence: Synthetic oligonucleotide
ctcgaaaacagccacctcgtc

SEQ ID NO: 33479 - DNA, 21 bp, Artificial Sequence
  Description of Artificial Sequence: Synthetic oligonucleotide
ctcgaaccaatcgtcagaaac

SEQ ID NO: 33480 - DNA, 21 bp, Artificial Sequence
  Description of Artificial Sequence: Synthetic oligonucleotide
ctcgaaccacaaacacacagc

SEQ ID NO: 33481 - DNA, 21 bp, Artificial Sequence
  Description of Artificial Sequence: Synthetic oligonucleotide
ctcgaaccaagccacacaatc

SEQ ID NO: 33482 - DNA, 21 bp, Artificial Sequence
  Description of Artificial Sequence: Synthetic oligonucleotide
ctcgaaccatacaaacacttc

SEQ ID NO: 33483 - DNA, 21 bp, Artificial Sequence
  Description of Artificial Sequence: Synthetic oligonucleotide
ctcgaacaattcagcacagca

SEQ ID NO: 33484 - DNA, 21 bp, Artificial Sequence
  Description of Artificial Sequence: Synthetic oligonucleotide
ctcgaacaaccaccagaacac

SEQ ID NO: 33485 - DNA, 21 bp, Artificial Sequence
  Description of Artificial Sequence: Synthetic oligonucleotide
ctcgaacaatacaacaaagaa

SEQ ID NO: 33486 - DNA, 21 bp, Artificial Sequence
  Description of Artificial Sequence: Synthetic oligonucleotide
ctcgaaagaggaagcagcgaa

SEQ ID NO: 33487 - DNA, 21 bp, Artificial Sequence
  Description of Artificial Sequence: Synthetic oligonucleotide
ctcgaaagaatcagcagcgtc

SEQ ID NO: 33488 - DNA, 21 bp, Artificial Sequence
  Description of Artificial Sequence: Synthetic oligonucleotide
ctcgaaagcgcactcagcagc

SEQ ID NO: 33489 - DNA, 21 bp, Artificial Sequence
  Description of Artificial Sequence: Synthetic oligonucleotide
ctcgaaagcgcatggatcgga

SEQ ID NO: 33490 - DNA, 21 bp, Artificial Sequence
  Description of Artificial Sequence: Synthetic oligonucleotide
ctcgaaagcaaaccaagccca

SEQ ID NO: 33491 - DNA, 21 bp, Artificial Sequence
  Description of Artificial Sequence: Synthetic oligonucleotide
ctcgaaagcaacaactacctc

SEQ ID NO: 33492 - DNA, 21 bp, Artificial Sequence
  Description of Artificial Sequence: Synthetic oligonucleotide
ctcgaaagccaaacaagaaac

SEQ ID NO: 33493 - DNA, 21 bp, Artificial Sequence
  Description of Artificial Sequence: Synthetic oligonucleotide
ctcgaaagcagaagcggaatg

SEQ ID NO: 33494 - DNA, 21 bp, Artificial Sequence
  Description of Artificial Sequence: Synthetic oligonucleotide
ctcgaaagcagccacacaaga

SEQ ID NO: 33495 - DNA, 21 bp, Artificial Sequence
  Description of Artificial Sequence: Synthetic oligonucleotide
ctcgaaagcagcgtcagagtc

SEQ ID NO: 33496 - DNA, 21 bp, Artificial Sequence
  Description of Artificial Sequence: Synthetic oligonucleotide
ctcgaaacagcaagcacaaaa

SEQ ID NO: 33497 - DNA, 21 bp, Artificial Sequence
  Description of Artificial Sequence: Synthetic oligonucleotide
ctcgaaacaagacaaatcgga

SEQ ID NO: 33498 - DNA, 21 bp, Artificial Sequence
  Description of Artificial Sequence: Synthetic oligonucleotide
ctcgaaacaagcgacagcgtc

SEQ ID NO: 33499 - DNA, 21 bp, Artificial Sequence
  Description of Artificial Sequence: Synthetic oligonucleotide
ctcgaagtcgcactcagaaca

SEQ ID NO: 33500 - DNA, 21 bp, Artificial Sequence
  Description of Artificial Sequence: Synthetic oligonucleotide
ctcgaagtcgcaagcaaccca

SEQ ID NO: 33501 - DNA, 21 bp, Artificial Sequence
  Description of Artificial Sequence: Synthetic oligonucleotide
ctcgaagtcacagaaccatgg

SEQ ID NO: 33502 - DNA, 21 bp, Artificial Sequence
  Description of Artificial Sequence: Synthetic oligonucleotide
ctcttcgcaatcagcgtccca

SEQ ID NO: 33503 - DNA, 21 bp, Artificial Sequence
  Description of Artificial Sequence: Synthetic oligonucleotide
ctcttcgcaaacacaatcagc

SEQ ID NO: 33504 - DNA, 21 bp, Artificial Sequence
  Description of Artificial Sequence: Synthetic oligonucleotide
ctcttcgacgcagcactccca

SEQ ID NO: 33505 - DNA, 21 bp, Artificial Sequence
  Description of Artificial Sequence: Synthetic oligonucleotide
ctcttcgacttcacaaaagaa

SEQ ID NO: 33506 - DNA, 21 bp, Artificial Sequence
  Description of Artificial Sequence: Synthetic oligonucleotide
ctcttcgacccaaacagagga

SEQ ID NO: 33507 - DNA, 21 bp, Artificial Sequence
  Description of Artificial Sequence: Synthetic oligonucleotide
ctcttcgacagaacagcactc

SEQ ID NO: 33508 - DNA, 21 bp, Artificial Sequence
  Description of Artificial Sequence: Synthetic oligonucleotide
ctcttcgacagcagcacaaca

SEQ ID NO: 33509 - DNA, 21 bp, Artificial Sequence
  Description of Artificial Sequence: Synthetic oligonucleotide
ctcttcgaactccaacacaga

SEQ ID NO: 33510 - DNA, 21 bp, Artificial Sequence
  Description of Artificial Sequence: Synthetic oligonucleotide
ctcttcttcacagcagcacca

SEQ ID NO: 33511 - DNA, 21 bp, Artificial Sequence
  Description of Artificial Sequence: Synthetic oligonucleotide
ctcttcggaaaagtcagcgga

SEQ ID NO: 33512 - DNA, 21 bp, Artificial Sequence
  Description of Artificial Sequence: Synthetic oligonucleotide
ctcttcggaagcagaccaaca

SEQ ID NO: 33513 - DNA, 21 bp, Artificial Sequence
  Description of Artificial Sequence: Synthetic oligonucleotide
ctcttcggaacaaacagaagc

SEQ ID NO: 33514 - DNA, 21 bp, Artificial Sequence
  Description of Artificial Sequence: Synthetic oligonucleotide
ctcttccacgaaagcacatac

SEQ ID NO: 33515 - DNA, 21 bp, Artificial Sequence
  Description of Artificial Sequence: Synthetic oligonucleotide
ctcttccacagcaacgacgac

SEQ ID NO: 33516 - DNA, 21 bp, Artificial Sequence
  Description of Artificial Sequence: Synthetic oligonucleotide
ctcttcatcaaccacggaagc

SEQ ID NO: 33517 - DNA, 21 bp, Artificial Sequence
  Description of Artificial Sequence: Synthetic oligonucleotide
ctcttcatcacaacaacaagc

SEQ ID NO: 33518 - DNA, 21 bp, Artificial Sequence
  Description of Artificial Sequence: Synthetic oligonucleotide
ctcttcaaacacagcagagaa

SEQ ID NO: 33519 - DNA, 21 bp, Artificial Sequence
  Description of Artificial Sequence: Synthetic oligonucleotide
ctcttcctcagccaagtccca

SEQ ID NO: 33520 - DNA, 21 bp, Artificial Sequence
  Description of Artificial Sequence: Synthetic oligonucleotide
ctcttcaaccaacaagtcctc

SEQ ID NO: 33521 - DNA, 21 bp, Artificial Sequence
  Description of Artificial Sequence: Synthetic oligonucleotide
ctcttcaacagcagcccagaa

SEQ ID NO: 33522 - DNA, 21 bp, Artificial Sequence
  Description of Artificial Sequence: Synthetic oligonucleotide
ctcttcccaggaagcatcgac

SEQ ID NO: 33523 - DNA, 21 bp, Artificial Sequence
  Description of Artificial Sequence: Synthetic oligonucleotide
ctcttcccaacaggaagcctc

SEQ ID NO: 33524 - DNA, 21 bp, Artificial Sequence
  Description of Artificial Sequence: Synthetic oligonucleotide
ctcttcagagcaagcgacaga

SEQ ID NO: 33525 - DNA, 21 bp, Artificial Sequence
  Description of Artificial Sequence: Synthetic oligonucleotide
ctcttcagcgaaagcagaagc

SEQ ID NO: 33526 - DNA, 21 bp, Artificial Sequence
  Description of Artificial Sequence: Synthetic oligonucleotide
ctcttcagcggagcagaaagc

SEQ ID NO: 33527 - DNA, 21 bp, Artificial Sequence
  Description of Artificial Sequence: Synthetic oligonucleotide
ctcttcagcatgccagtcagc

SEQ ID NO: 33528 - DNA, 21 bp, Artificial Sequence
  Description of Artificial Sequence: Synthetic oligonucleotide
ctcttcacaagcgcagacctc

SEQ ID NO: 33529 - DNA, 21 bp, Artificial Sequence
  Description of Artificial Sequence: Synthetic oligonucleotide
ctcttcacaagcgaaagcatc

SEQ ID NO: 33530 - DNA, 21 bp, Artificial Sequence
  Description of Artificial Sequence: Synthetic oligonucleotide
ctcttcacaagcccaagcatg

SEQ ID NO: 33531 - DNA, 21 bp, Artificial Sequence
  Description of Artificial Sequence: Synthetic oligonucleotide
ctcttcacaacaatggtccca

SEQ ID NO: 33532 - DNA, 21 bp, Artificial Sequence
  Description of Artificial Sequence: Synthetic oligonucleotide
ctcggagcagcagtcaacctc

SEQ ID NO: 33533 - DNA, 21 bp, Artificial Sequence
  Description of Artificial Sequence: Synthetic oligonucleotide
ctcggagcaggaagcagcgtc

SEQ ID NO: 33534 - DNA, 21 bp, Artificial Sequence
  Description of Artificial Sequence: Synthetic oligonucleotide
ctcggagcactcagcggacca

SEQ ID NO: 33535 - DNA, 21 bp, Artificial Sequence
  Description of Artificial Sequence: Synthetic oligonucleotide
ctcggagcactcacacacgca

SEQ ID NO: 33536 - DNA, 21 bp, Artificial Sequence
  Description of Artificial Sequence: Synthetic oligonucleotide
ctcggagcaagaatccaactc

SEQ ID NO: 33537 - DNA, 21 bp, Artificial Sequence
  Description of Artificial Sequence: Synthetic oligonucleotide
ctcggagcaagaacagcagca

SEQ ID NO: 33538 - DNA, 21 bp, Artificial Sequence
  Description of Artificial Sequence: Synthetic oligonucleotide
ctcggagcaagcagcagcctc

SEQ ID NO: 33539 - DNA, 21 bp, Artificial Sequence
  Description of Artificial Sequence: Synthetic oligonucleotide
ctcggagcatacctcggacca

SEQ ID NO: 33540 - DNA, 21 bp, Artificial Sequence
  Description of Artificial Sequence: Synthetic oligonucleotide
ctcggagcatacaacgcacaa

SEQ ID NO: 33541 - DNA, 21 bp, Artificial Sequence
  Description of Artificial Sequence: Synthetic oligonucleotide
ctcggagacgcaggattcagc

SEQ ID NO: 33542 - DNA, 21 bp, Artificial Sequence
  Description of Artificial Sequence: Synthetic oligonucleotide
ctcggagaccactacagacac

SEQ ID NO: 33543 - DNA, 21 bp, Artificial Sequence
  Description of Artificial Sequence: Synthetic oligonucleotide
ctcggagacccattcccacca

SEQ ID NO: 33544 - DNA, 21 bp, Artificial Sequence
  Description of Artificial Sequence: Synthetic oligonucleotide
ctcggagacagaacagacttc

SEQ ID NO: 33545 - DNA, 21 bp, Artificial Sequence
  Description of Artificial Sequence: Synthetic oligonucleotide
ctcggagacagaacacacatc

SEQ ID NO: 33546 - DNA, 21 bp, Artificial Sequence
  Description of Artificial Sequence: Synthetic oligonucleotide
ctcggagacacagcacaccac

SEQ ID NO: 33547 - DNA, 21 bp, Artificial Sequence
  Description of Artificial Sequence: Synthetic oligonucleotide
ctcggattcggagcaacacaa

SEQ ID NO: 33548 - DNA, 21 bp, Artificial Sequence
  Description of Artificial Sequence: Synthetic oligonucleotide
ctcggattcaacgtcgtcgtc

SEQ ID NO: 33549 - DNA, 21 bp, Artificial Sequence
  Description of Artificial Sequence: Synthetic oligonucleotide
ctcggattcaactaccaagac

SEQ ID NO: 33550 - DNA, 21 bp, Artificial Sequence
  Description of Artificial Sequence: Synthetic oligonucleotide
ctcggattcccaagcacagaa

SEQ ID NO: 33551 - DNA, 21 bp, Artificial Sequence
  Description of Artificial Sequence: Synthetic oligonucleotide
ctcggaggagacgcacaaatc

SEQ ID NO: 33552 - DNA, 21 bp, Artificial Sequence
  Description of Artificial Sequence: Synthetic oligonucleotide
ctcggaggaggaagaagcctc

SEQ ID NO: 33553 - DNA, 21 bp, Artificial Sequence
  Description of Artificial Sequence: Synthetic oligonucleotide
ctcggaggaagcctcagcatg

SEQ ID NO: 33554 - DNA, 21 bp, Artificial Sequence
  Description of Artificial Sequence: Synthetic oligonucleotide
ctcggaggaagctacccactc

SEQ ID NO: 33555 - DNA, 21 bp, Artificial Sequence
  Description of Artificial Sequence: Synthetic oligonucleotide
ctcggacacgcaacaagcgca

SEQ ID NO: 33556 - DNA, 21 bp, Artificial Sequence
  Description of Artificial Sequence: Synthetic oligonucleotide
ctcggacacggaccaggacac

SEQ ID NO: 33557 - DNA, 21 bp, Artificial Sequence
  Description of Artificial Sequence: Synthetic oligonucleotide
ctcggacacagcaaaccacca

SEQ ID NO: 33558 - DNA, 21 bp, Artificial Sequence
  Description of Artificial Sequence: Synthetic oligonucleotide
ctcggaatcatcacacacgca

SEQ ID NO: 33559 - DNA, 21 bp, Artificial Sequence
  Description of Artificial Sequence: Synthetic oligonucleotide
ctcggaatcatgaaaacagca

SEQ ID NO: 33560 - DNA, 21 bp, Artificial Sequence
  Description of Artificial Sequence: Synthetic oligonucleotide
ctcggaaaactcacaacagtc

SEQ ID NO: 33561 - DNA, 21 bp, Artificial Sequence
  Description of Artificial Sequence: Synthetic oligonucleotide
ctcggaaaaagcctcctcaca

SEQ ID NO: 33562 - DNA, 21 bp, Artificial Sequence
  Description of Artificial Sequence: Synthetic oligonucleotide
ctcggaaaatacggaatcgtc

SEQ ID NO: 33563 - DNA, 21 bp, Artificial Sequence
  Description of Artificial Sequence: Synthetic oligonucleotide
ctcggactcaaccaccaaaca

SEQ ID NO: 33564 - DNA, 21 bp, Artificial Sequence
  Description of Artificial Sequence: Synthetic oligonucleotide
ctcggactcccaagcaaagga

SEQ ID NO: 33565 - DNA, 21 bp, Artificial Sequence
  Description of Artificial Sequence: Synthetic oligonucleotide
ctcggactcagagacaaagac

SEQ ID NO: 33566 - DNA, 21 bp, Artificial Sequence
  Description of Artificial Sequence: Synthetic oligonucleotide
ctcggactcagagaaagcagc

SEQ ID NO: 33567 - DNA, 21 bp, Artificial Sequence
  Description of Artificial Sequence: Synthetic oligonucleotide
ctcggactcagcacagtccac

SEQ ID NO: 33568 - DNA, 21 bp, Artificial Sequence
  Description of Artificial Sequence: Synthetic oligonucleotide
ctcggactcgtcctcaaccaa

SEQ ID NO: 33569 - DNA, 21 bp, Artificial Sequence
  Description of Artificial Sequence: Synthetic oligonucleotide
ctcggaatgctcaaaacagaa

SEQ ID NO: 33570 - DNA, 21 bp, Artificial Sequence
  Description of Artificial Sequence: Synthetic oligonucleotide
ctcggaatgatgccagcaagc

SEQ ID NO: 33571 - DNA, 21 bp, Artificial Sequence
  Description of Artificial Sequence: Synthetic oligonucleotide
ctcggaaaccacccaagcgtc

SEQ ID NO: 33572 - DNA, 21 bp, Artificial Sequence
  Description of Artificial Sequence: Synthetic oligonucleotide
ctcggaaacccagacaaaatg

SEQ ID NO: 33573 - DNA, 21 bp, Artificial Sequence
  Description of Artificial Sequence: Synthetic oligonucleotide
ctcggaaacccaagcccatgc

SEQ ID NO: 33574 - DNA, 21 bp, Artificial Sequence
  Description of Artificial Sequence: Synthetic oligonucleotide
ctcggaaacccagtcacagtc

SEQ ID NO: 33575 - DNA, 21 bp, Artificial Sequence
  Description of Artificial Sequence: Synthetic oligonucleotide
ctcggaaaccaaagaagcgac

SEQ ID NO: 33576 - DNA, 21 bp, Artificial Sequence
  Description of Artificial Sequence: Synthetic oligonucleotide
ctcggaccagcaggaatgcca

SEQ ID NO: 33577 - DNA, 21 bp, Artificial Sequence
  Description of Artificial Sequence: Synthetic oligonucleotide
ctcggaccagcaggaccatac

SEQ ID NO: 33578 - DNA, 21 bp, Artificial Sequence
  Description of Artificial Sequence: Synthetic oligonucleotide
ctcggaccattccacggagaa

SEQ ID NO: 33579 - DNA, 21 bp, Artificial Sequence
  Description of Artificial Sequence: Synthetic oligonucleotide
ctcggaccaggaagctaccca

SEQ ID NO: 33580 - DNA, 21 bp, Artificial Sequence
  Description of Artificial Sequence: Synthetic oligonucleotide
ctcggaccaagcagcaaagtc

SEQ ID NO: 33581 - DNA, 21 bp, Artificial Sequence
  Description of Artificial Sequence: Synthetic oligonucleotide
ctcggaccaagctacacaaac

SEQ ID NO: 33582 - DNA, 21 bp, Artificial Sequence
  Description of Artificial Sequence: Synthetic oligonucleotide
ctcggaccaacaatcagaagc

SEQ ID NO: 33583 - DNA, 21 bp, Artificial Sequence
  Description of Artificial Sequence: Synthetic oligonucleotide
ctcggaccaacaaaactccca

SEQ ID NO: 33584 - DNA, 21 bp, Artificial Sequence
  Description of Artificial Sequence: Synthetic oligonucleotide
ctcggacaagcactcagagtc

SEQ ID NO: 33585 - DNA, 21 bp, Artificial Sequence
  Description of Artificial Sequence: Synthetic oligonucleotide
ctcggacaaaaaccaaacgaa

SEQ ID NO: 33586 - DNA, 21 bp, Artificial Sequence
  Description of Artificial Sequence: Synthetic oligonucleotide
ctcggacaaagcggatgcaga

SEQ ID NO: 33587 - DNA, 21 bp, Artificial Sequence
  Description of Artificial Sequence: Synthetic oligonucleotide
ctcggacaaagcggaacaaaa

SEQ ID NO: 33588 - DNA, 21 bp, Artificial Sequence
  Description of Artificial Sequence: Synthetic oligonucleotide
ctcggaagagcactcgaacac

SEQ ID NO: 33589 - DNA, 21 bp, Artificial Sequence
  Description of Artificial Sequence: Synthetic oligonucleotide
ctcggaagagcatacagccaa

SEQ ID NO: 33590 - DNA, 21 bp, Artificial Sequence
  Description of Artificial Sequence: Synthetic oligonucleotide
ctcggaagagaaagaccaaca

SEQ ID NO: 33591 - DNA, 21 bp, Artificial Sequence
  Description of Artificial Sequence: Synthetic oligonucleotide
ctcggaagaatcgcagtcaac

SEQ ID NO: 33592 - DNA, 21 bp, Artificial Sequence
  Description of Artificial Sequence: Synthetic oligonucleotide
ctcggaagactcaacagcgga

SEQ ID NO: 33593 - DNA, 21 bp, Artificial Sequence
  Description of Artificial Sequence: Synthetic oligonucleotide
ctcggaagaccacaaatggac

SEQ ID NO: 33594 - DNA, 21 bp, Artificial Sequence
  Description of Artificial Sequence: Synthetic oligonucleotide
ctcggaagaagcggagcactc

SEQ ID NO: 33595 - DNA, 21 bp, Artificial Sequence
  Description of Artificial Sequence: Synthetic oligonucleotide
ctcggaagcgcaggaccacca

SEQ ID NO: 33596 - DNA, 21 bp, Artificial Sequence
  Description of Artificial Sequence: Synthetic oligonucleotide
ctcggaagcgcaggatacagc

SEQ ID NO: 33597 - DNA, 21 bp, Artificial Sequence
  Description of Artificial Sequence: Synthetic oligonucleotide
ctcggaagcgcacacagccca

SEQ ID NO: 33598 - DNA, 21 bp, Artificial Sequence
  Description of Artificial Sequence: Synthetic oligonucleotide
ctcggaagcgcaacaagcgga

SEQ ID NO: 33599 - DNA, 21 bp, Artificial Sequence
  Description of Artificial Sequence: Synthetic oligonucleotide
ctcggaagccactacagcaac

SEQ ID NO: 33600 - DNA, 21 bp, Artificial Sequence
  Description of Artificial Sequence: Synthetic oligonucleotide
ctcggaagcctcacagtcgca

SEQ ID NO: 33601 - DNA, 21 bp, Artificial Sequence
  Description of Artificial Sequence: Synthetic oligonucleotide
ctcggaagcatgccactcctc

SEQ ID NO: 33602 - DNA, 21 bp, Artificial Sequence
  Description of Artificial Sequence: Synthetic oligonucleotide
ctcggaagcaaccacaaacca

SEQ ID NO: 33603 - DNA, 21 bp, Artificial Sequence
  Description of Artificial Sequence: Synthetic oligonucleotide
ctcggaagcccaagcccagac

SEQ ID NO: 33604 - DNA, 21 bp, Artificial Sequence
  Description of Artificial Sequence: Synthetic oligonucleotide
ctcggaagccaagtcatcgca

SEQ ID NO: 33605 - DNA, 21 bp, Artificial Sequence
  Description of Artificial Sequence: Synthetic oligonucleotide
ctcggaagccaatacgcagtc

SEQ ID NO: 33606 - DNA, 21 bp, Artificial Sequence
  Description of Artificial Sequence: Synthetic oligonucleotide
ctcggaagcagaagcgacctc

SEQ ID NO: 33607 - DNA, 21 bp, Artificial Sequence
  Description of Artificial Sequence: Synthetic oligonucleotide
ctcggaagcagcctcagagca

SEQ ID NO: 33608 - DNA, 21 bp, Artificial Sequence
  Description of Artificial Sequence: Synthetic oligonucleotide
ctcggaagcagcctcagaaac

SEQ ID NO: 33609 - DNA, 21 bp, Artificial Sequence
  Description of Artificial Sequence: Synthetic oligonucleotide
ctcggaagcagccaaagcaga

SEQ ID NO: 33610 - DNA, 21 bp, Artificial Sequence
  Description of Artificial Sequence: Synthetic oligonucleotide
ctcggaagcacaagcgcagtc

SEQ ID NO: 33611 - DNA, 21 bp, Artificial Sequence
  Description of Artificial Sequence: Synthetic oligonucleotide
ctcggaagcgtcaaattcagc

SEQ ID NO: 33612 - DNA, 21 bp, Artificial Sequence
  Description of Artificial Sequence: Synthetic oligonucleotide
ctcggaacagcactccacctc

SEQ ID NO: 33613 - DNA, 21 bp, Artificial Sequence
  Description of Artificial Sequence: Synthetic oligonucleotide
ctcggaacaggaagactctac

SEQ ID NO: 33614 - DNA, 21 bp, Artificial Sequence
  Description of Artificial Sequence: Synthetic oligonucleotide
ctcggaacactcaacacagtc

SEQ ID NO: 33615 - DNA, 21 bp, Artificial Sequence
  Description of Artificial Sequence: Synthetic oligonucleotide
ctcggaacaagagcaagcgga

SEQ ID NO: 33616 - DNA, 21 bp, Artificial Sequence
  Description of Artificial Sequence: Synthetic oligonucleotide
ctcggaacaagaccaatgctc

SEQ ID NO: 33617 - DNA, 21 bp, Artificial Sequence
  Description of Artificial Sequence: Synthetic oligonucleotide
ctcggaacaagcgacgtcctc

SEQ ID NO: 33618 - DNA, 21 bp, Artificial Sequence
  Description of Artificial Sequence: Synthetic oligonucleotide
ctcggaacaagccacgtcgca

SEQ ID NO: 33619 - DNA, 21 bp, Artificial Sequence
  Description of Artificial Sequence: Synthetic oligonucleotide
ctcggaacaagccaaacagga

SEQ ID NO: 33620 - DNA, 21 bp, Artificial Sequence
  Description of Artificial Sequence: Synthetic oligonucleotide
ctcggaacagtcagagtctac

SEQ ID NO: 33621 - DNA, 21 bp, Artificial Sequence
  Description of Artificial Sequence: Synthetic oligonucleotide
ctcggagtcgcaaaaccagca

SEQ ID NO: 33622 - DNA, 21 bp, Artificial Sequence
  Description of Artificial Sequence: Synthetic oligonucleotide
ctcggagtcgacaaaaacgca

SEQ ID NO: 33623 - DNA, 21 bp, Artificial Sequence
  Description of Artificial Sequence: Synthetic oligonucleotide
ctcggagtcgaagtcctcaaa

SEQ ID NO: 33624 - DNA, 21 bp, Artificial Sequence
  Description of Artificial Sequence: Synthetic oligonucleotide
ctcggagtcaaagcagcagga

SEQ ID NO: 33625 - DNA, 21 bp, Artificial Sequence
  Description of Artificial Sequence: Synthetic oligonucleotide
ctcggagtcaaaagcgtcgac

SEQ ID NO: 33626 - DNA, 21 bp, Artificial Sequence
  Description of Artificial Sequence: Synthetic oligonucleotide
ctcggagtcctcagaagcagc

SEQ ID NO: 33627 - DNA, 21 bp, Artificial Sequence
  Description of Artificial Sequence: Synthetic oligonucleotide
ctcggagtcaacacaagccaa

SEQ ID NO: 33628 - DNA, 21 bp, Artificial Sequence
  Description of Artificial Sequence: Synthetic oligonucleotide
ctcggagtcccaccacaaagc

SEQ ID NO: 33629 - DNA, 21 bp, Artificial Sequence
  Description of Artificial Sequence: Synthetic oligonucleotide
ctcggagtcagcagagaactc

SEQ ID NO: 33630 - DNA, 21 bp, Artificial Sequence
  Description of Artificial Sequence: Synthetic oligonucleotide
ctcggagtcagcacacacatg

SEQ ID NO: 33631 - DNA, 21 bp, Artificial Sequence
  Description of Artificial Sequence: Synthetic oligonucleotide
ctcggatacaacctcggagaa

SEQ ID NO: 33632 - DNA, 21 bp, Artificial Sequence
  Description of Artificial Sequence: Synthetic oligonucleotide
ctcggatacccaccaagagaa

SEQ ID NO: 33633 - DNA, 21 bp, Artificial Sequence
  Description of Artificial Sequence: Synthetic oligonucleotide
ctcggatacagcacaggagca

SEQ ID NO: 33634 - DNA, 21 bp, Artificial Sequence
  Description of Artificial Sequence: Synthetic oligonucleotide
ctccacgcagcaccagcaagc

SEQ ID NO: 33635 - DNA, 21 bp, Artificial Sequence
  Description of Artificial Sequence: Synthetic oligonucleotide
ctccacgcaaacagaacagaa

SEQ ID NO: 33636 - DNA, 21 bp, Artificial Sequence
  Description of Artificial Sequence: Synthetic oligonucleotide
ctccacgcaccagaagtcgca

SEQ ID NO: 33637 - DNA, 21 bp, Artificial Sequence
  Description of Artificial Sequence: Synthetic oligonucleotide
ctccacgcaacaagcagcaca

SEQ ID NO: 33638 - DNA, 21 bp, Artificial Sequence
  Description of Artificial Sequence: Synthetic oligonucleotide
ctccacgcaacaacaggacca

SEQ ID NO: 33639 - DNA, 21 bp, Artificial Sequence
  Description of Artificial Sequence: Synthetic oligonucleotide
ctccacgaatacagaagccca

SEQ ID NO: 33640 - DNA, 21 bp, Artificial Sequence
  Description of Artificial Sequence: Synthetic oligonucleotide
ctccacttcggaccagaagga

SEQ ID NO: 33641 - DNA, 21 bp, Artificial Sequence
  Description of Artificial Sequence: Synthetic oligonucleotide
ctccacggactcggaagcgga

SEQ ID NO: 33642 - DNA, 21 bp, Artificial Sequence
  Description of Artificial Sequence: Synthetic oligonucleotide
ctccacggaatgccagaaaga

SEQ ID NO: 33643 - DNA, 21 bp, Artificial Sequence
  Description of Artificial Sequence: Synthetic oligonucleotide
ctccacatcagagaaatggca

SEQ ID NO: 33644 - DNA, 21 bp, Artificial Sequence
  Description of Artificial Sequence: Synthetic oligonucleotide
ctccacaaaagcggattcaac

SEQ ID NO: 33645 - DNA, 21 bp, Artificial Sequence
  Description of Artificial Sequence: Synthetic oligonucleotide
ctccacctccaaggaaacagc

SEQ ID NO: 33646 - DNA, 21 bp, Artificial Sequence
  Description of Artificial Sequence: Synthetic oligonucleotide
ctccacctcagcagaccactc

SEQ ID NO: 33647 - DNA, 21 bp, Artificial Sequence
  Description of Artificial Sequence: Synthetic oligonucleotide
ctccacctcagcacagcacca

SEQ ID NO: 33648 - DNA, 21 bp, Artificial Sequence
  Description of Artificial Sequence: Synthetic oligonucleotide
ctccacatgacaacaacaaga

SEQ ID NO: 33649 - DNA, 21 bp, Artificial Sequence
  Description of Artificial Sequence: Synthetic oligonucleotide
ctccacaacgacctcatcaga

SEQ ID NO: 33650 - DNA, 21 bp, Artificial Sequence
  Description of Artificial Sequence: Synthetic oligonucleotide
ctccacaacatcagacaacaa

SEQ ID NO: 33651 - DNA, 21 bp, Artificial Sequence
  Description of Artificial Sequence: Synthetic oligonucleotide
ctccacaacaaaatgtacgac

SEQ ID NO: 33652 - DNA, 21 bp, Artificial Sequence
  Description of Artificial Sequence: Synthetic oligonucleotide
ctccacaaccaagcagcaaga

SEQ ID NO: 33653 - DNA, 21 bp, Artificial Sequence
  Description of Artificial Sequence: Synthetic oligonucleotide
ctccacaacacagcagcagca

SEQ ID NO: 33654 - DNA, 21 bp, Artificial Sequence
  Description of Artificial Sequence: Synthetic oligonucleotide
ctccacaacacaagaaacatg

SEQ ID NO: 33655 - DNA, 21 bp, Artificial Sequence
  Description of Artificial Sequence: Synthetic oligonucleotide
ctccacaacacaagaacagtc

SEQ ID NO: 33656 - DNA, 21 bp, Artificial Sequence
  Description of Artificial Sequence: Synthetic oligonucleotide
ctccacccaggaagcacagca

SEQ ID NO: 33657 - DNA, 21 bp, Artificial Sequence
  Description of Artificial Sequence: Synthetic oligonucleotide
ctccacccactcagcccaaga

SEQ ID NO: 33658 - DNA, 21 bp, Artificial Sequence
  Description of Artificial Sequence: Synthetic oligonucleotide
ctccacccagtccacgcacca

SEQ ID NO: 33659 - DNA, 21 bp, Artificial Sequence
  Description of Artificial Sequence: Synthetic oligonucleotide
ctccaccaagacagactcgca

SEQ ID NO: 33660 - DNA, 21 bp, Artificial Sequence
  Description of Artificial Sequence: Synthetic oligonucleotide
ctccaccaaatgggaaacagc

SEQ ID NO: 33661 - DNA, 21 bp, Artificial Sequence
  Description of Artificial Sequence: Synthetic oligonucleotide
ctccaccaaagctacaaccaa

SEQ ID NO: 33662 - DNA, 21 bp, Artificial Sequence
  Description of Artificial Sequence: Synthetic oligonucleotide
ctccacagagacctcccagtc

SEQ ID NO: 33663 - DNA, 21 bp, Artificial Sequence
  Description of Artificial Sequence: Synthetic oligonucleotide
ctccacagaagaccaagcgaa

SEQ ID NO: 33664 - DNA, 21 bp, Artificial Sequence
  Description of Artificial Sequence: Synthetic oligonucleotide
ctccacagcgcactcacaaga

SEQ ID NO: 33665 - DNA, 21 bp, Artificial Sequence
  Description of Artificial Sequence: Synthetic oligonucleotide
ctccacagcgcaagcccacaa

SEQ ID NO: 33666 - DNA, 21 bp, Artificial Sequence
  Description of Artificial Sequence: Synthetic oligonucleotide
ctccacagcgacacaagagga

SEQ ID NO: 33667 - DNA, 21 bp, Artificial Sequence
  Description of Artificial Sequence: Synthetic oligonucleotide
ctccacagcgaactcacaagc

SEQ ID NO: 33668 - DNA, 21 bp, Artificial Sequence
  Description of Artificial Sequence: Synthetic oligonucleotide
ctccacagcggagaaagacaa

SEQ ID NO: 33669 - DNA, 21 bp, Artificial Sequence
  Description of Artificial Sequence: Synthetic oligonucleotide
ctccacagcaacgtcacaaaa

SEQ ID NO: 33670 - DNA, 21 bp, Artificial Sequence
  Description of Artificial Sequence: Synthetic oligonucleotide
ctccacagcagagcagacagc

SEQ ID NO: 33671 - DNA, 21 bp, Artificial Sequence
  Description of Artificial Sequence: Synthetic oligonucleotide
ctccacagcagagcaatcagc

SEQ ID NO: 33672 - DNA, 21 bp, Artificial Sequence
  Description of Artificial Sequence: Synthetic oligonucleotide
ctccacagcagaggaacagca

SEQ ID NO: 33673 - DNA, 21 bp, Artificial Sequence
  Description of Artificial Sequence: Synthetic oligonucleotide
ctccacagcagcccacaagac

SEQ ID NO: 33674 - DNA, 21 bp, Artificial Sequence
  Description of Artificial Sequence: Synthetic oligonucleotide
ctccacacagcaaaagcagga

SEQ ID NO: 33675 - DNA, 21 bp, Artificial Sequence
  Description of Artificial Sequence: Synthetic oligonucleotide
ctccacacagactggctcaga

SEQ ID NO: 33676 - DNA, 21 bp, Artificial Sequence
  Description of Artificial Sequence: Synthetic oligonucleotide
ctccacacaccacaactcagc

SEQ ID NO: 33677 - DNA, 21 bp, Artificial Sequence
  Description of Artificial Sequence: Synthetic oligonucleotide
ctccacacaagcgcaagacca

SEQ ID NO: 33678 - DNA, 21 bp, Artificial Sequence
  Description of Artificial Sequence: Synthetic oligonucleotide
ctccacgtcccacaaccacca

SEQ ID NO: 33679 - DNA, 21 bp, Artificial Sequence
  Description of Artificial Sequence: Synthetic oligonucleotide
ctcatcgcaagccacagactc

SEQ ID NO: 33680 - DNA, 21 bp, Artificial Sequence
  Description of Artificial Sequence: Synthetic oligonucleotide
ctcatcgcaagcagcggagtc

SEQ ID NO: 33681 - DNA, 21 bp, Artificial Sequence
  Description of Artificial Sequence: Synthetic oligonucleotide
ctcatcgcaagcacaacaagc

SEQ ID NO: 33682 - DNA, 21 bp, Artificial Sequence
  Description of Artificial Sequence: Synthetic oligonucleotide
ctcatcggaaacgtcgtcatg

SEQ ID NO: 33683 - DNA, 21 bp, Artificial Sequence
  Description of Artificial Sequence: Synthetic oligonucleotide
ctcatcggaagaccaatggaa

SEQ ID NO: 33684 - DNA, 21 bp, Artificial Sequence
  Description of Artificial Sequence: Synthetic oligonucleotide
ctcatcggaagaacaatcagc

SEQ ID NO: 33685 - DNA, 21 bp, Artificial Sequence
  Description of Artificial Sequence: Synthetic oligonucleotide
ctcatcggaacagcaagcctc

SEQ ID NO: 33686 - DNA, 21 bp, Artificial Sequence
  Description of Artificial Sequence: Synthetic oligonucleotide
ctcatcggaacaccagtcgtc

SEQ ID NO: 33687 - DNA, 21 bp, Artificial Sequence
  Description of Artificial Sequence: Synthetic oligonucleotide
ctcatccacgcaagcggagga

SEQ ID NO: 33688 - DNA, 21 bp, Artificial Sequence
  Description of Artificial Sequence: Synthetic oligonucleotide
ctcatccacctcagcggagca

SEQ ID NO: 33689 - DNA, 21 bp, Artificial Sequence
  Description of Artificial Sequence: Synthetic oligonucleotide
ctcatcaaagaaaacgtcctc

SEQ ID NO: 33690 - DNA, 21 bp, Artificial Sequence
  Description of Artificial Sequence: Synthetic oligonucleotide
ctcatcaaaggagcagcaagc

SEQ ID NO: 33691 - DNA, 21 bp, Artificial Sequence
  Description of Artificial Sequence: Synthetic oligonucleotide
ctcatcaaaggaagcctcgac

SEQ ID NO: 33692 - DNA, 21 bp, Artificial Sequence
  Description of Artificial Sequence: Synthetic oligonucleotide
ctcatcaaaccaagcgtccca

SEQ ID NO: 33693 - DNA, 21 bp, Artificial Sequence
  Description of Artificial Sequence: Synthetic oligonucleotide
ctcatcaaaagcagcgaacca

SEQ ID NO: 33694 - DNA, 21 bp, Artificial Sequence
  Description of Artificial Sequence: Synthetic oligonucleotide
ctcatcaaaagcacactcgtc

SEQ ID NO: 33695 - DNA, 21 bp, Artificial Sequence
  Description of Artificial Sequence: Synthetic oligonucleotide
ctcatcaaaacaacacacgga

SEQ ID NO: 33696 - DNA, 21 bp, Artificial Sequence
  Description of Artificial Sequence: Synthetic oligonucleotide
ctcatcctcccaaaccacagc

SEQ ID NO: 33697 - DNA, 21 bp, Artificial Sequence
  Description of Artificial Sequence: Synthetic oligonucleotide
ctcatcatgagacacgactgc

SEQ ID NO: 33698 - DNA, 21 bp, Artificial Sequence
  Description of Artificial Sequence: Synthetic oligonucleotide
ctcatcaacgaaaacccacac

SEQ ID NO: 33699 - DNA, 21 bp, Artificial Sequence
  Description of Artificial Sequence: Synthetic oligonucleotide
ctcatcaacaaaatcagccca

SEQ ID NO: 33700 - DNA, 21 bp, Artificial Sequence
  Description of Artificial Sequence: Synthetic oligonucleotide
ctcatcaacccagaaatgtac

SEQ ID NO: 33701 - DNA, 21 bp, Artificial Sequence
  Description of Artificial Sequence: Synthetic oligonucleotide
ctcatcccaccacaccacgac

SEQ ID NO: 33702 - DNA, 21 bp, Artificial Sequence
  Description of Artificial Sequence: Synthetic oligonucleotide
ctcatcccaacagtcatgaac

SEQ ID NO: 33703 - DNA, 21 bp, Artificial Sequence
  Description of Artificial Sequence: Synthetic oligonucleotide
ctcatccaagaagtcctccaa

SEQ ID NO: 33704 - DNA, 21 bp, Artificial Sequence
  Description of Artificial Sequence: Synthetic oligonucleotide
ctcatccaaatcagccaacaa

SEQ ID NO: 33705 - DNA, 21 bp, Artificial Sequence
  Description of Artificial Sequence: Synthetic oligonucleotide
ctcatccaaaaccaaggaaca

SEQ ID NO: 33706 - DNA, 21 bp, Artificial Sequence
  Description of Artificial Sequence: Synthetic oligonucleotide
ctcatcagagaacaaaaccca

SEQ ID NO: 33707 - DNA, 21 bp, Artificial Sequence
  Description of Artificial Sequence: Synthetic oligonucleotide
ctcatcagactcagcgacaac

SEQ ID NO: 33708 - DNA, 21 bp, Artificial Sequence
  Description of Artificial Sequence: Synthetic oligonucleotide
ctcatcagaagcgacacaatc

SEQ ID NO: 33709 - DNA, 21 bp, Artificial Sequence
  Description of Artificial Sequence: Synthetic oligonucleotide
ctcatcagaagcatcccacca

SEQ ID NO: 33710 - DNA, 21 bp, Artificial Sequence
  Description of Artificial Sequence: Synthetic oligonucleotide
ctcatcagcgcaagccacatc

SEQ ID NO: 33711 - DNA, 21 bp, Artificial Sequence
  Description of Artificial Sequence: Synthetic oligonucleotide
ctcatcagcgacgcaagcagc

SEQ ID NO: 33712 - DNA, 21 bp, Artificial Sequence
  Description of Artificial Sequence: Synthetic oligonucleotide
ctcatcagcccaacagtcaca

SEQ ID NO: 33713 - DNA, 21 bp, Artificial Sequence
  Description of Artificial Sequence: Synthetic oligonucleotide
ctcatcagcagagaagtcaca

SEQ ID NO: 33714 - DNA, 21 bp, Artificial Sequence
  Description of Artificial Sequence: Synthetic oligonucleotide
ctcatcagcagagtcccagac

SEQ ID NO: 33715 - DNA, 21 bp, Artificial Sequence
  Description of Artificial Sequence: Synthetic oligonucleotide
ctcatcacagcagcactcgca

SEQ ID NO: 33716 - DNA, 21 bp, Artificial Sequence
  Description of Artificial Sequence: Synthetic oligonucleotide
ctcatcacaggacacagcaca

SEQ ID NO: 33717 - DNA, 21 bp, Artificial Sequence
  Description of Artificial Sequence: Synthetic oligonucleotide
ctcatcacaccaggagcaagc

SEQ ID NO: 33718 - DNA, 21 bp, Artificial Sequence
  Description of Artificial Sequence: Synthetic oligonucleotide
ctcatcacaccactcccaagc

SEQ ID NO: 33719 - DNA, 21 bp, Artificial Sequence
  Description of Artificial Sequence: Synthetic oligonucleotide
ctcatcacaagcgcagcagga

SEQ ID NO: 33720 - DNA, 21 bp, Artificial Sequence
  Description of Artificial Sequence: Synthetic oligonucleotide
ctcatcgtcgcactcaaagga

SEQ ID NO: 33721 - DNA, 21 bp, Artificial Sequence
  Description of Artificial Sequence: Synthetic oligonucleotide
ctcatcgtcgaacaagcaaga

SEQ ID NO: 33722 - DNA, 21 bp, Artificial Sequence
  Description of Artificial Sequence: Synthetic oligonucleotide
ctcatcgtcacagaaaacaaa

SEQ ID NO: 33723 - DNA, 21 bp, Artificial Sequence
  Description of Artificial Sequence: Synthetic oligonucleotide
ctcaaagcaggaagcagcagc

SEQ ID NO: 33724 - DNA, 21 bp, Artificial Sequence
  Description of Artificial Sequence: Synthetic oligonucleotide
ctcaaagcaggaacatacgga

SEQ ID NO: 33725 - DNA, 21 bp, Artificial Sequence
  Description of Artificial Sequence: Synthetic oligonucleotide
ctcaaagcaatcccatacgga

SEQ ID NO: 33726 - DNA, 21 bp, Artificial Sequence
  Description of Artificial Sequence: Synthetic oligonucleotide
ctcaaagcacaagtcgaactc

SEQ ID NO: 33727 - DNA, 21 bp, Artificial Sequence
  Description of Artificial Sequence: Synthetic oligonucleotide
ctcaaagcaacaatcacaagc

SEQ ID NO: 33728 - DNA, 21 bp, Artificial Sequence
  Description of Artificial Sequence: Synthetic oligonucleotide
ctcaaagacggaagagcaagc

SEQ ID NO: 33729 - DNA, 21 bp, Artificial Sequence
  Description of Artificial Sequence: Synthetic oligonucleotide
ctcaaagacatgagactcaca

SEQ ID NO: 33730 - DNA, 21 bp, Artificial Sequence
  Description of Artificial Sequence: Synthetic oligonucleotide
ctcaaagacccagcaagactc

SEQ ID NO: 33731 - DNA, 21 bp, Artificial Sequence
  Description of Artificial Sequence: Synthetic oligonucleotide
ctcaaagacccaacagcatgg

SEQ ID NO: 33732 - DNA, 21 bp, Artificial Sequence
  Description of Artificial Sequence: Synthetic oligonucleotide
ctcaaagacagcctcacatgc

SEQ ID NO: 33733 - DNA, 21 bp, Artificial Sequence
  Description of Artificial Sequence: Synthetic oligonucleotide
ctcaaagactacggaggagca

SEQ ID NO: 33734 - DNA, 21 bp, Artificial Sequence
  Description of Artificial Sequence: Synthetic oligonucleotide
ctcaaagaaatcgcaggactc

SEQ ID NO: 33735 - DNA, 21 bp, Artificial Sequence
  Description of Artificial Sequence: Synthetic oligonucleotide
ctcaaattcagcgaaagcaaa

SEQ ID NO: 33736 - DNA, 21 bp, Artificial Sequence
  Description of Artificial Sequence: Synthetic oligonucleotide
ctcaaaggagcagtcgtcgtc

SEQ ID NO: 33737 - DNA, 21 bp, Artificial Sequence
  Description of Artificial Sequence: Synthetic oligonucleotide
ctcaaaggagacgcaggatac

SEQ ID NO: 33738 - DNA, 21 bp, Artificial Sequence
  Description of Artificial Sequence: Synthetic oligonucleotide
ctcaaaggaggagcagacaca

SEQ ID NO: 33739 - DNA, 21 bp, Artificial Sequence
  Description of Artificial Sequence: Synthetic oligonucleotide
ctcaaaggaatgacaggactc

SEQ ID NO: 33740 - DNA, 21 bp, Artificial Sequence
  Description of Artificial Sequence: Synthetic oligonucleotide
ctcaaaggaccaaacgcagtc

SEQ ID NO: 33741 - DNA, 21 bp, Artificial Sequence
  Description of Artificial Sequence: Synthetic oligonucleotide
ctcaaaggatacatcgacagc

SEQ ID NO: 33742 - DNA, 21 bp, Artificial Sequence
  Description of Artificial Sequence: Synthetic oligonucleotide
ctcaaacaccaactcctcgca

SEQ ID NO: 33743 - DNA, 21 bp, Artificial Sequence
  Description of Artificial Sequence: Synthetic oligonucleotide
ctcaaacacagcctcccagac

SEQ ID NO: 33744 - DNA, 21 bp, Artificial Sequence
  Description of Artificial Sequence: Synthetic oligonucleotide
ctcaaaatcggaacagtcaca

SEQ ID NO: 33745 - DNA, 21 bp, Artificial Sequence
  Description of Artificial Sequence: Synthetic oligonucleotide
ctcaaactcgcaccaaacgtc

SEQ ID NO: 33746 - DNA, 21 bp, Artificial Sequence
  Description of Artificial Sequence: Synthetic oligonucleotide
ctcaaactcgacgaaggactc

SEQ ID NO: 33747 - DNA, 21 bp, Artificial Sequence
  Description of Artificial Sequence: Synthetic oligonucleotide
ctcaaactcagagcaagcgaa

SEQ ID NO: 33748 - DNA, 21 bp, Artificial Sequence
  Description of Artificial Sequence: Synthetic oligonucleotide
ctcaaaatgagcagcacacca

SEQ ID NO: 33749 - DNA, 21 bp, Artificial Sequence
  Description of Artificial Sequence: Synthetic oligonucleotide
ctcaaaatggtcgacaacgtc

SEQ ID NO: 33750 - DNA, 21 bp, Artificial Sequence
  Description of Artificial Sequence: Synthetic oligonucleotide
ctcaaaaacggaagcatggtc

SEQ ID NO: 33751 - DNA, 21 bp, Artificial Sequence
  Description of Artificial Sequence: Synthetic oligonucleotide
ctcaaaaacccactcccaagc

SEQ ID NO: 33752 - DNA, 21 bp, Artificial Sequence
  Description of Artificial Sequence: Synthetic oligonucleotide
ctcaaaaacccaagcaacgtc

SEQ ID NO: 33753 - DNA, 21 bp, Artificial Sequence
  Description of Artificial Sequence: Synthetic oligonucleotide
ctcaaaccagacatgacaaga

SEQ ID NO: 33754 - DNA, 21 bp, Artificial Sequence
  Description of Artificial Sequence: Synthetic oligonucleotide
ctcaaaccagacagaccagac

SEQ ID NO: 33755 - DNA, 21 bp, Artificial Sequence
  Description of Artificial Sequence: Synthetic oligonucleotide
ctcaaaccaaacgaaatcagc

SEQ ID NO: 33756 - DNA, 21 bp, Artificial Sequence
  Description of Artificial Sequence: Synthetic oligonucleotide
ctcaaaccaagcccaatccca

SEQ ID NO: 33757 - DNA, 21 bp, Artificial Sequence
  Description of Artificial Sequence: Synthetic oligonucleotide
ctcaaaccaagcagctacgtc

SEQ ID NO: 33758 - DNA, 21 bp, Artificial Sequence
  Description of Artificial Sequence: Synthetic oligonucleotide
ctcaaaccagtcccaagcctc

SEQ ID NO: 33759 - DNA, 21 bp, Artificial Sequence
  Description of Artificial Sequence: Synthetic oligonucleotide
ctcaaacaaatcgacctcgga

SEQ ID NO: 33760 - DNA, 21 bp, Artificial Sequence
  Description of Artificial Sequence: Synthetic oligonucleotide
ctcaaacaaccaacacaatgc

SEQ ID NO: 33761 - DNA, 21 bp, Artificial Sequence
  Description of Artificial Sequence: Synthetic oligonucleotide
ctcaaaagagaattcgactac

SEQ ID NO: 33762 - DNA, 21 bp, Artificial Sequence
  Description of Artificial Sequence: Synthetic oligonucleotide
ctcaaaagcgcaacaacaatc

SEQ ID NO: 33763 - DNA, 21 bp, Artificial Sequence
  Description of Artificial Sequence: Synthetic oligonucleotide
ctcaaaagcggagtcagccca

SEQ ID NO: 33764 - DNA, 21 bp, Artificial Sequence
  Description of Artificial Sequence: Synthetic oligonucleotide
ctcaaaagcccaagcacacca

SEQ ID NO: 33765 - DNA, 21 bp, Artificial Sequence
  Description of Artificial Sequence: Synthetic oligonucleotide
ctcaaaagccaactcagcgac

SEQ ID NO: 33766 - DNA, 21 bp, Artificial Sequence
  Description of Artificial Sequence: Synthetic oligonucleotide
ctcaaaagccaaagcttcaca

SEQ ID NO: 33767 - DNA, 21 bp, Artificial Sequence
  Description of Artificial Sequence: Synthetic oligonucleotide
ctcaaaagcacactcatgcca

SEQ ID NO: 33768 - DNA, 21 bp, Artificial Sequence
  Description of Artificial Sequence: Synthetic oligonucleotide
ctcaaaagcacaccaccagga

SEQ ID NO: 33769 - DNA, 21 bp, Artificial Sequence
  Description of Artificial Sequence: Synthetic oligonucleotide
ctcaaaagcacaagccaagtc

SEQ ID NO: 33770 - DNA, 21 bp, Artificial Sequence
  Description of Artificial Sequence: Synthetic oligonucleotide
ctcaaaacaggaagagacagc

SEQ ID NO: 33771 - DNA, 21 bp, Artificial Sequence
  Description of Artificial Sequence: Synthetic oligonucleotide
ctcaaaacaggatacatgcca

SEQ ID NO: 33772 - DNA, 21 bp, Artificial Sequence
  Description of Artificial Sequence: Synthetic oligonucleotide
ctcaaaacactcctcaaaaca

SEQ ID NO: 33773 - DNA, 21 bp, Artificial Sequence
  Description of Artificial Sequence: Synthetic oligonucleotide
ctcaaaacaaacgaaagagtc

SEQ ID NO: 33774 - DNA, 21 bp, Artificial Sequence
  Description of Artificial Sequence: Synthetic oligonucleotide
ctcaaaacaagcggagtcatc

SEQ ID NO: 33775 - DNA, 21 bp, Artificial Sequence
  Description of Artificial Sequence: Synthetic oligonucleotide
ctcaaaacaagcaacagagac

SEQ ID NO: 33776 - DNA, 21 bp, Artificial Sequence
  Description of Artificial Sequence: Synthetic oligonucleotide
ctcaaaacaacaaacccacca

SEQ ID NO: 33777 - DNA, 21 bp, Artificial Sequence
  Description of Artificial Sequence: Synthetic oligonucleotide
ctcaaaacagtccacagcgac

SEQ ID NO: 33778 - DNA, 21 bp, Artificial Sequence
  Description of Artificial Sequence: Synthetic oligonucleotide
ctcaaagtcgaaatgagccca

SEQ ID NO: 33779 - DNA, 21 bp, Artificial Sequence
  Description of Artificial Sequence: Synthetic oligonucleotide
ctcaaatgggaacacacaagc

SEQ ID NO: 33780 - DNA, 21 bp, Artificial Sequence
  Description of Artificial Sequence: Synthetic oligonucleotide
ctcaaatggggaccaccagac

SEQ ID NO: 33781 - DNA, 21 bp, Artificial Sequence
  Description of Artificial Sequence: Synthetic oligonucleotide
ctcaaatacaacatcccagtc

SEQ ID NO: 33782 - DNA, 21 bp, Artificial Sequence
  Description of Artificial Sequence: Synthetic oligonucleotide
ctcctcgcagcaatgggacca

SEQ ID NO: 33783 - DNA, 21 bp, Artificial Sequence
  Description of Artificial Sequence: Synthetic oligonucleotide
ctcctcgcattcgaaaaacaa

SEQ ID NO: 33784 - DNA, 21 bp, Artificial Sequence
  Description of Artificial Sequence: Synthetic oligonucleotide
ctcctcgcaggacaccacgga

SEQ ID NO: 33785 - DNA, 21 bp, Artificial Sequence
  Description of Artificial Sequence: Synthetic oligonucleotide
ctcctcgcaagaggagtcaac

SEQ ID NO: 33786 - DNA, 21 bp, Artificial Sequence
  Description of Artificial Sequence: Synthetic oligonucleotide
ctcctcgcaacaagcctcaca

SEQ ID NO: 33787 - DNA, 21 bp, Artificial Sequence
  Description of Artificial Sequence: Synthetic oligonucleotide
ctcctcgacggaagagcaaga

SEQ ID NO: 33788 - DNA, 21 bp, Artificial Sequence
  Description of Artificial Sequence: Synthetic oligonucleotide
ctcctcgacaaagaaagagaa

SEQ ID NO: 33789 - DNA, 21 bp, Artificial Sequence
  Description of Artificial Sequence: Synthetic oligonucleotide
ctcctcgaccaagacttcttc

SEQ ID NO: 33790 - DNA, 21 bp, Artificial Sequence
  Description of Artificial Sequence: Synthetic oligonucleotide
ctcctcgacacaggagtccca

SEQ ID NO: 33791 - DNA, 21 bp, Artificial Sequence
  Description of Artificial Sequence: Synthetic oligonucleotide
ctcctcgaaaaaggacaaagc

SEQ ID NO: 33792 - DNA, 21 bp, Artificial Sequence
  Description of Artificial Sequence: Synthetic oligonucleotide
ctcctcgaaagaagctaccca

SEQ ID NO: 33793 - DNA, 21 bp, Artificial Sequence
  Description of Artificial Sequence: Synthetic oligonucleotide
ctcctcgaagtcccaatcaga

SEQ ID NO: 33794 - DNA, 21 bp, Artificial Sequence
  Description of Artificial Sequence: Synthetic oligonucleotide
ctcctcttcaaaagcagcagc

SEQ ID NO: 33795 - DNA, 21 bp, Artificial Sequence
  Description of Artificial Sequence: Synthetic oligonucleotide
ctcctcggagcaagacacctc

SEQ ID NO: 33796 - DNA, 21 bp, Artificial Sequence
  Description of Artificial Sequence: Synthetic oligonucleotide
ctcctcggagcaagcagcgca

SEQ ID NO: 33797 - DNA, 21 bp, Artificial Sequence
  Description of Artificial Sequence: Synthetic oligonucleotide
ctcctcggacacgcagcaagc

SEQ ID NO: 33798 - DNA, 21 bp, Artificial Sequence
  Description of Artificial Sequence: Synthetic oligonucleotide
ctcctcggaccagacccaagc

SEQ ID NO: 33799 - DNA, 21 bp, Artificial Sequence
  Description of Artificial Sequence: Synthetic oligonucleotide
ctcctcggaccactccaagga

SEQ ID NO: 33800 - DNA, 21 bp, Artificial Sequence
  Description of Artificial Sequence: Synthetic oligonucleotide
ctcctcggaagactccaacca

SEQ ID NO: 33801 - DNA, 21 bp, Artificial Sequence
  Description of Artificial Sequence: Synthetic oligonucleotide
ctcctcggaagaagcacagga

SEQ ID NO: 33802 - DNA, 21 bp, Artificial Sequence
  Description of Artificial Sequence: Synthetic oligonucleotide
ctcctcggaagcagaccaagc

SEQ ID NO: 33803 - DNA, 21 bp, Artificial Sequence
  Description of Artificial Sequence: Synthetic oligonucleotide
ctcctcggagtcctccaccca

SEQ ID NO: 33804 - DNA, 21 bp, Artificial Sequence
  Description of Artificial Sequence: Synthetic oligonucleotide
ctcctcggagtcacaaaccca

SEQ ID NO: 33805 - DNA, 21 bp, Artificial Sequence
  Description of Artificial Sequence: Synthetic oligonucleotide
ctcctccacctcggacaaaca

SEQ ID NO: 33806 - DNA, 21 bp, Artificial Sequence
  Description of Artificial Sequence: Synthetic oligonucleotide
ctcctccacccagcaccaaga

SEQ ID NO: 33807 - DNA, 21 bp, Artificial Sequence
  Description of Artificial Sequence: Synthetic oligonucleotide
ctcctccacccagaagcaatc

SEQ ID NO: 33808 - DNA, 21 bp, Artificial Sequence
  Description of Artificial Sequence: Synthetic oligonucleotide
ctcctccacagcagcagccaa

SEQ ID NO: 33809 - DNA, 21 bp, Artificial Sequence
  Description of Artificial Sequence: Synthetic oligonucleotide
ctcctccacacacaaggaaac

SEQ ID NO: 33810 - DNA, 21 bp, Artificial Sequence
  Description of Artificial Sequence: Synthetic oligonucleotide
ctcctccacacagtcagcgaa

SEQ ID NO: 33811 - DNA, 21 bp, Artificial Sequence
  Description of Artificial Sequence: Synthetic oligonucleotide
ctcctccacgtcccaagagaa

SEQ ID NO: 33812 - DNA, 21 bp, Artificial Sequence
  Description of Artificial Sequence: Synthetic oligonucleotide
ctcctcatctgcggagaacac

SEQ ID NO: 33813 - DNA, 21 bp, Artificial Sequence
  Description of Artificial Sequence: Synthetic oligonucleotide
ctcctcaaaggattcagcgtc

SEQ ID NO: 33814 - DNA, 21 bp, Artificial Sequence
  Description of Artificial Sequence: Synthetic oligonucleotide
ctcctcaaaccagcagcacca

SEQ ID NO: 33815 - DNA, 21 bp, Artificial Sequence
  Description of Artificial Sequence: Synthetic oligonucleotide
ctcctcaaaagcccagtccca

SEQ ID NO: 33816 - DNA, 21 bp, Artificial Sequence
  Description of Artificial Sequence: Synthetic oligonucleotide
ctcctcctcgcaccaacaagc

SEQ ID NO: 33817 - DNA, 21 bp, Artificial Sequence
  Description of Artificial Sequence: Synthetic oligonucleotide
ctcctcctcgcaagaacagtc

SEQ ID NO: 33818 - DNA, 21 bp, Artificial Sequence
  Description of Artificial Sequence: Synthetic oligonucleotide
ctcctcctcgacgaccacaca

SEQ ID NO: 33819 - DNA, 21 bp, Artificial Sequence
  Description of Artificial Sequence: Synthetic oligonucleotide
ctcctcctcccagcaagagga

SEQ ID NO: 33820 - DNA, 21 bp, Artificial Sequence
  Description of Artificial Sequence: Synthetic oligonucleotide
ctcctcctccaagcaagagca

SEQ ID NO: 33821 - DNA, 21 bp, Artificial Sequence
  Description of Artificial Sequence: Synthetic oligonucleotide
ctcctcctccaaaaaggacca

SEQ ID NO: 33822 - DNA, 21 bp, Artificial Sequence
  Description of Artificial Sequence: Synthetic oligonucleotide
ctcctcctcagagcagacgga

SEQ ID NO: 33823 - DNA, 21 bp, Artificial Sequence
  Description of Artificial Sequence: Synthetic oligonucleotide
ctcctcctcagcgtcggaaca

SEQ ID NO: 33824 - DNA, 21 bp, Artificial Sequence
  Description of Artificial Sequence: Synthetic oligonucleotide
ctcctcctcacaggagtcgca

SEQ ID NO: 33825 - DNA, 21 bp, Artificial Sequence
  Description of Artificial Sequence: Synthetic oligonucleotide
ctcctcatgccaagcggactc

SEQ ID NO: 33826 - DNA, 21 bp, Artificial Sequence
  Description of Artificial Sequence: Synthetic oligonucleotide
ctcctcaacgacgcatacgtc

SEQ ID NO: 33827 - DNA, 21 bp, Artificial Sequence
  Description of Artificial Sequence: Synthetic oligonucleotide
ctcctcaacggacacgaagca

SEQ ID NO: 33828 - DNA, 21 bp, Artificial Sequence
  Description of Artificial Sequence: Synthetic oligonucleotide
ctcctcaacatggcaagaaca

SEQ ID NO: 33829 - DNA, 21 bp, Artificial Sequence
  Description of Artificial Sequence: Synthetic oligonucleotide
ctcctcaacacaagcagcgca

SEQ ID NO: 33830 - DNA, 21 bp, Artificial Sequence
  Description of Artificial Sequence: Synthetic oligonucleotide
ctcctcccagcagaaagagca

SEQ ID NO: 33831 - DNA, 21 bp, Artificial Sequence
  Description of Artificial Sequence: Synthetic oligonucleotide
ctcctcccagaatacagcaga

SEQ ID NO: 33832 - DNA, 21 bp, Artificial Sequence
  Description of Artificial Sequence: Synthetic oligonucleotide
ctcctcccaggaagaacagac

SEQ ID NO: 33833 - DNA, 21 bp, Artificial Sequence
  Description of Artificial Sequence: Synthetic oligonucleotide
ctcctcccacacgaaggaaca

SEQ ID NO: 33834 - DNA, 21 bp, Artificial Sequence
  Description of Artificial Sequence: Synthetic oligonucleotide
ctcctcccaaaagcaagcagc

SEQ ID NO: 33835 - DNA, 21 bp, Artificial Sequence
  Description of Artificial Sequence: Synthetic oligonucleotide
ctcctcccactcgcaccaaga

SEQ ID NO: 33836 - DNA, 21 bp, Artificial Sequence
  Description of Artificial Sequence: Synthetic oligonucleotide
ctcctcccaaacccaccaaca

SEQ ID NO: 33837 - DNA, 21 bp, Artificial Sequence
  Description of Artificial Sequence: Synthetic oligonucleotide
ctcctcccaaaccaaagcttc

SEQ ID NO: 33838 - DNA, 21 bp, Artificial Sequence
  Description of Artificial Sequence: Synthetic oligonucleotide
ctcctcccaaacacaccacca

SEQ ID NO: 33839 - DNA, 21 bp, Artificial Sequence
  Description of Artificial Sequence: Synthetic oligonucleotide
ctcctcccaccaagagaccca

SEQ ID NO: 33840 - DNA, 21 bp, Artificial Sequence
  Description of Artificial Sequence: Synthetic oligonucleotide
ctcctcccaccaagcagcagc

SEQ ID NO: 33841 - DNA, 21 bp, Artificial Sequence
  Description of Artificial Sequence: Synthetic oligonucleotide
ctcctcccacaattcagaagc

SEQ ID NO: 33842 - DNA, 21 bp, Artificial Sequence
  Description of Artificial Sequence: Synthetic oligonucleotide
ctcctcccaagaacacactac

SEQ ID NO: 33843 - DNA, 21 bp, Artificial Sequence
  Description of Artificial Sequence: Synthetic oligonucleotide
ctcctcccaagcctcgcaagc

SEQ ID NO: 33844 - DNA, 21 bp, Artificial Sequence
  Description of Artificial Sequence: Synthetic oligonucleotide
ctcctcccaagcagaggagca

SEQ ID NO: 33845 - DNA, 21 bp, Artificial Sequence
  Description of Artificial Sequence: Synthetic oligonucleotide
ctcctcccaacaagcaaactc

SEQ ID NO: 33846 - DNA, 21 bp, Artificial Sequence
  Description of Artificial Sequence: Synthetic oligonucleotide
ctcctcccagtcctcagcgaa

SEQ ID NO: 33847 - DNA, 21 bp, Artificial Sequence
  Description of Artificial Sequence: Synthetic oligonucleotide
ctcctccaaccaagcgtccca

SEQ ID NO: 33848 - DNA, 21 bp, Artificial Sequence
  Description of Artificial Sequence: Synthetic oligonucleotide
ctcctccaacaaccagaatgg

SEQ ID NO: 33849 - DNA, 21 bp, Artificial Sequence
  Description of Artificial Sequence: Synthetic oligonucleotide
ctcctccaaagaagcctcagc

SEQ ID NO: 33850 - DNA, 21 bp, Artificial Sequence
  Description of Artificial Sequence: Synthetic oligonucleotide
ctcctccaaacactcaaacca

SEQ ID NO: 33851 - DNA, 21 bp, Artificial Sequence
  Description of Artificial Sequence: Synthetic oligonucleotide
ctcctcagaggagcagtcgca

SEQ ID NO: 33852 - DNA, 21 bp, Artificial Sequence
  Description of Artificial Sequence: Synthetic oligonucleotide
ctcctcagaggagacgcagca

SEQ ID NO: 33853 - DNA, 21 bp, Artificial Sequence
  Description of Artificial Sequence: Synthetic oligonucleotide
ctcctcagaaaagacgaagca

SEQ ID NO: 33854 - DNA, 21 bp, Artificial Sequence
  Description of Artificial Sequence: Synthetic oligonucleotide
ctcctcagaaacaacccacac

SEQ ID NO: 33855 - DNA, 21 bp, Artificial Sequence
  Description of Artificial Sequence: Synthetic oligonucleotide
ctcctcagaaacgtcctccca

SEQ ID NO: 33856 - DNA, 21 bp, Artificial Sequence
  Description of Artificial Sequence: Synthetic oligonucleotide
ctcctcagaagccaaagcgca

SEQ ID NO: 33857 - DNA, 21 bp, Artificial Sequence
  Description of Artificial Sequence: Synthetic oligonucleotide
ctcctcagaacaccaagcagc

SEQ ID NO: 33858 - DNA, 21 bp, Artificial Sequence
  Description of Artificial Sequence: Synthetic oligonucleotide
ctcctcagagtcccaaaccca

SEQ ID NO: 33859 - DNA, 21 bp, Artificial Sequence
  Description of Artificial Sequence: Synthetic oligonucleotide
ctcctcagcgcagcagacaga

SEQ ID NO: 33860 - DNA, 21 bp, Artificial Sequence
  Description of Artificial Sequence: Synthetic oligonucleotide
ctcctcagcgcaccatacaca

SEQ ID NO: 33861 - DNA, 21 bp, Artificial Sequence
  Description of Artificial Sequence: Synthetic oligonucleotide
ctcctcagcgcaagcacaagc

SEQ ID NO: 33862 - DNA, 21 bp, Artificial Sequence
  Description of Artificial Sequence: Synthetic oligonucleotide
ctcctcagcgacagcgcaaga

SEQ ID NO: 33863 - DNA, 21 bp, Artificial Sequence
  Description of Artificial Sequence: Synthetic oligonucleotide
ctcctcagcttcacaacagac

SEQ ID NO: 33864 - DNA, 21 bp, Artificial Sequence
  Description of Artificial Sequence: Synthetic oligonucleotide
ctcctcagcggagcactccaa

SEQ ID NO: 33865 - DNA, 21 bp, Artificial Sequence
  Description of Artificial Sequence: Synthetic oligonucleotide
ctcctcagcggaagagtcaca

SEQ ID NO: 33866 - DNA, 21 bp, Artificial Sequence
  Description of Artificial Sequence: Synthetic oligonucleotide
ctcctcagcaaaggacacagc

SEQ ID NO: 33867 - DNA, 21 bp, Artificial Sequence
  Description of Artificial Sequence: Synthetic oligonucleotide
ctcctcagcatgagaacacca

SEQ ID NO: 33868 - DNA, 21 bp, Artificial Sequence
  Description of Artificial Sequence: Synthetic oligonucleotide
ctcctcagcccagacgaatac

SEQ ID NO: 33869 - DNA, 21 bp, Artificial Sequence
  Description of Artificial Sequence: Synthetic oligonucleotide
ctcctcagcccaggaccactc

SEQ ID NO: 33870 - DNA, 21 bp, Artificial Sequence
  Description of Artificial Sequence: Synthetic oligonucleotide
ctcctcagcagagtccacgac

SEQ ID NO: 33871 - DNA, 21 bp, Artificial Sequence
  Description of Artificial Sequence: Synthetic oligonucleotide
ctcctcagcacagcagtcagc

SEQ ID NO: 33872 - DNA, 21 bp, Artificial Sequence
  Description of Artificial Sequence: Synthetic oligonucleotide
ctcctcagcacagacggaagc

SEQ ID NO: 33873 - DNA, 21 bp, Artificial Sequence
  Description of Artificial Sequence: Synthetic oligonucleotide
ctcctcagcgtccacgaaatg

SEQ ID NO: 33874 - DNA, 21 bp, Artificial Sequence
  Description of Artificial Sequence: Synthetic oligonucleotide
ctcctcacagacgaatgcaca

SEQ ID NO: 33875 - DNA, 21 bp, Artificial Sequence
  Description of Artificial Sequence: Synthetic oligonucleotide
ctcctcacagacagaagactc

SEQ ID NO: 33876 - DNA, 21 bp, Artificial Sequence
  Description of Artificial Sequence: Synthetic oligonucleotide
ctcctcacacacttcagcagc

SEQ ID NO: 33877 - DNA, 21 bp, Artificial Sequence
  Description of Artificial Sequence: Synthetic oligonucleotide
ctcctcacaatcggaaaacca

SEQ ID NO: 33878 - DNA, 21 bp, Artificial Sequence
  Description of Artificial Sequence: Synthetic oligonucleotide
ctcctcacactcagcgaagtc

SEQ ID NO: 33879 - DNA, 21 bp, Artificial Sequence
  Description of Artificial Sequence: Synthetic oligonucleotide
ctcctcacactcagcacacca

SEQ ID NO: 33880 - DNA, 21 bp, Artificial Sequence
  Description of Artificial Sequence: Synthetic oligonucleotide
ctcctcacaaacgcaatccca

SEQ ID NO: 33881 - DNA, 21 bp, Artificial Sequence
  Description of Artificial Sequence: Synthetic oligonucleotide
ctcctcacaccatacaaccca

SEQ ID NO: 33882 - DNA, 21 bp, Artificial Sequence
  Description of Artificial Sequence: Synthetic oligonucleotide
ctcctcacaagaagcacagaa

SEQ ID NO: 33883 - DNA, 21 bp, Artificial Sequence
  Description of Artificial Sequence: Synthetic oligonucleotide
ctcctcgtccacaaagtcgtc

SEQ ID NO: 33884 - DNA, 21 bp, Artificial Sequence
  Description of Artificial Sequence: Synthetic oligonucleotide
ctcctcgtcagacacagagac

SEQ ID NO: 33885 - DNA, 21 bp, Artificial Sequence
  Description of Artificial Sequence: Synthetic oligonucleotide
ctcctcgtcagaaacacagac

SEQ ID NO: 33886 - DNA, 21 bp, Artificial Sequence
  Description of Artificial Sequence: Synthetic oligonucleotide
ctcctcgtcagcgaaaacagc

SEQ ID NO: 33887 - DNA, 21 bp, Artificial Sequence
  Description of Artificial Sequence: Synthetic oligonucleotide
ctcctcgtcacagacaaaatg

SEQ ID NO: 33888 - DNA, 21 bp, Artificial Sequence
  Description of Artificial Sequence: Synthetic oligonucleotide
ctcctcgtcgtcccaagcaga

SEQ ID NO: 33889 - DNA, 21 bp, Artificial Sequence
  Description of Artificial Sequence: Synthetic oligonucleotide
ctcctctacgcagaaagacca

SEQ ID NO: 33890 - DNA, 21 bp, Artificial Sequence
  Description of Artificial Sequence: Synthetic oligonucleotide
ctcctctaccaaaacagcagc

SEQ ID NO: 33891 - DNA, 21 bp, Artificial Sequence
  Description of Artificial Sequence: Synthetic oligonucleotide
ctcctctacagcacagacaaa

SEQ ID NO: 33892 - DNA, 21 bp, Artificial Sequence
  Description of Artificial Sequence: Synthetic oligonucleotide
ctcatggcacacagccaactc

SEQ ID NO: 33893 - DNA, 21 bp, Artificial Sequence
  Description of Artificial Sequence: Synthetic oligonucleotide
ctcatggcaatccacaaacca

SEQ ID NO: 33894 - DNA, 21 bp, Artificial Sequence
  Description of Artificial Sequence: Synthetic oligonucleotide
ctcatggcaacaagagtccca

SEQ ID NO: 33895 - DNA, 21 bp, Artificial Sequence
  Description of Artificial Sequence: Synthetic oligonucleotide
ctcatggacagcagaaaatac

SEQ ID NO: 33896 - DNA, 21 bp, Artificial Sequence
  Description of Artificial Sequence: Synthetic oligonucleotide
ctcatggaagcaacattcaaa

SEQ ID NO: 33897 - DNA, 21 bp, Artificial Sequence
  Description of Artificial Sequence: Synthetic oligonucleotide
ctcatggaacacatcatcgaa

SEQ ID NO: 33898 - DNA, 21 bp, Artificial Sequence
  Description of Artificial Sequence: Synthetic oligonucleotide
ctcatggaaaaccacatggca

SEQ ID NO: 33899 - DNA, 21 bp, Artificial Sequence
  Description of Artificial Sequence: Synthetic oligonucleotide
ctcatgggacaaggaagaaca

SEQ ID NO: 33900 - DNA, 21 bp, Artificial Sequence
  Description of Artificial Sequence: Synthetic oligonucleotide
ctcatgggacaagtcgcagga

SEQ ID NO: 33901 - DNA, 21 bp, Artificial Sequence
  Description of Artificial Sequence: Synthetic oligonucleotide
ctcatgaaaccaagcgcagga

SEQ ID NO: 33902 - DNA, 21 bp, Artificial Sequence
  Description of Artificial Sequence: Synthetic oligonucleotide
ctcatgaaaagagtcgaaaca

SEQ ID NO: 33903 - DNA, 21 bp, Artificial Sequence
  Description of Artificial Sequence: Synthetic oligonucleotide
ctcatgctcgcaagaaacgac

SEQ ID NO: 33904 - DNA, 21 bp, Artificial Sequence
  Description of Artificial Sequence: Synthetic oligonucleotide
ctcatgctcagaagcagccaa

SEQ ID NO: 33905 - DNA, 21 bp, Artificial Sequence
  Description of Artificial Sequence: Synthetic oligonucleotide
ctcatgaacggaggaagcaca

SEQ ID NO: 33906 - DNA, 21 bp, Artificial Sequence
  Description of Artificial Sequence: Synthetic oligonucleotide
ctcatgaacagcgcaatcgca

SEQ ID NO: 33907 - DNA, 21 bp, Artificial Sequence
  Description of Artificial Sequence: Synthetic oligonucleotide
ctcatgccaagcatgagacca

SEQ ID NO: 33908 - DNA, 21 bp, Artificial Sequence
  Description of Artificial Sequence: Synthetic oligonucleotide
ctcatgcaaccaaaaagcgca

SEQ ID NO: 33909 - DNA, 21 bp, Artificial Sequence
  Description of Artificial Sequence: Synthetic oligonucleotide
ctcatgagaatcagcacagca

SEQ ID NO: 33910 - DNA, 21 bp, Artificial Sequence
  Description of Artificial Sequence: Synthetic oligonucleotide
ctcatgagaccagcagaactc

SEQ ID NO: 33911 - DNA, 21 bp, Artificial Sequence
  Description of Artificial Sequence: Synthetic oligonucleotide
ctcatgagaacaaacccagac

SEQ ID NO: 33912 - DNA, 21 bp, Artificial Sequence
  Description of Artificial Sequence: Synthetic oligonucleotide
ctcatgagcctcacaacagtc

SEQ ID NO: 33913 - DNA, 21 bp, Artificial Sequence
  Description of Artificial Sequence: Synthetic oligonucleotide
ctcatgagcccacaaagccca

SEQ ID NO: 33914 - DNA, 21 bp, Artificial Sequence
  Description of Artificial Sequence: Synthetic oligonucleotide
ctcatgagccaagaactcaga

SEQ ID NO: 33915 - DNA, 21 bp, Artificial Sequence
  Description of Artificial Sequence: Synthetic oligonucleotide
ctcatgagccaaacacaaaga

SEQ ID NO: 33916 - DNA, 21 bp, Artificial Sequence
  Description of Artificial Sequence: Synthetic oligonucleotide
ctcatgagcagcaaaccacca

SEQ ID NO: 33917 - DNA, 21 bp, Artificial Sequence
  Description of Artificial Sequence: Synthetic oligonucleotide
ctcatgagcacagcagaacca

SEQ ID NO: 33918 - DNA, 21 bp, Artificial Sequence
  Description of Artificial Sequence: Synthetic oligonucleotide
ctcatgagcacagcaagccca

SEQ ID NO: 33919 - DNA, 21 bp, Artificial Sequence
  Description of Artificial Sequence: Synthetic oligonucleotide
ctcatgacaggaatcacaatc

SEQ ID NO: 33920 - DNA, 21 bp, Artificial Sequence
  Description of Artificial Sequence: Synthetic oligonucleotide
ctcatgacaggagtcccactc

SEQ ID NO: 33921 - DNA, 21 bp, Artificial Sequence
  Description of Artificial Sequence: Synthetic oligonucleotide
ctcatgacaaacgcacaactc

SEQ ID NO: 33922 - DNA, 21 bp, Artificial Sequence
  Description of Artificial Sequence: Synthetic oligonucleotide
ctcatgacaaacccagtccca

SEQ ID NO: 33923 - DNA, 21 bp, Artificial Sequence
  Description of Artificial Sequence: Synthetic oligonucleotide
ctcatgacaagcggacacaaa

SEQ ID NO: 33924 - DNA, 21 bp, Artificial Sequence
  Description of Artificial Sequence: Synthetic oligonucleotide
ctcatgacaagcaacggagca

SEQ ID NO: 33925 - DNA, 21 bp, Artificial Sequence
  Description of Artificial Sequence: Synthetic oligonucleotide
ctcatgacaacacacgtcgac

SEQ ID NO: 33926 - DNA, 21 bp, Artificial Sequence
  Description of Artificial Sequence: Synthetic oligonucleotide
ctcatggtcgaaagccacgtc

SEQ ID NO: 33927 - DNA, 21 bp, Artificial Sequence
  Description of Artificial Sequence: Synthetic oligonucleotide
ctcatggtcggaagaaaactc

SEQ ID NO: 33928 - DNA, 21 bp, Artificial Sequence
  Description of Artificial Sequence: Synthetic oligonucleotide
ctcaacgcaaacgcactcgca

SEQ ID NO: 33929 - DNA, 21 bp, Artificial Sequence
  Description of Artificial Sequence: Synthetic oligonucleotide
ctcaacgcaccaggaagaaca

SEQ ID NO: 33930 - DNA, 21 bp, Artificial Sequence
  Description of Artificial Sequence: Synthetic oligonucleotide
ctcaacgcaccaaacccaatg

SEQ ID NO: 33931 - DNA, 21 bp, Artificial Sequence
  Description of Artificial Sequence: Synthetic oligonucleotide
ctcaacgcacaagtcagcaca

SEQ ID NO: 33932 - DNA, 21 bp, Artificial Sequence
  Description of Artificial Sequence: Synthetic oligonucleotide
ctcaacgcaagcacaaaaaca

SEQ ID NO: 33933 - DNA, 21 bp, Artificial Sequence
  Description of Artificial Sequence: Synthetic oligonucleotide
ctcaacgcaacagacggaaaa

SEQ ID NO: 33934 - DNA, 21 bp, Artificial Sequence
  Description of Artificial Sequence: Synthetic oligonucleotide
ctcaacgacgacgcatggagc

SEQ ID NO: 33935 - DNA, 21 bp, Artificial Sequence
  Description of Artificial Sequence: Synthetic oligonucleotide
ctcaacgacgtcctcacacaa

SEQ ID NO: 33936 - DNA, 21 bp, Artificial Sequence
  Description of Artificial Sequence: Synthetic oligonucleotide
ctcaacgaaatcacaagaagc

SEQ ID NO: 33937 - DNA, 21 bp, Artificial Sequence
  Description of Artificial Sequence: Synthetic oligonucleotide
ctcaacgaactccaattccaa

SEQ ID NO: 33938 - DNA, 21 bp, Artificial Sequence
  Description of Artificial Sequence: Synthetic oligonucleotide
ctcaacgaaagaccaagaagc

SEQ ID NO: 33939 - DNA, 21 bp, Artificial Sequence
  Description of Artificial Sequence: Synthetic oligonucleotide
ctcaacggagaatacctcaaa

SEQ ID NO: 33940 - DNA, 21 bp, Artificial Sequence
  Description of Artificial Sequence: Synthetic oligonucleotide
ctcaacggattcacagcaaca

SEQ ID NO: 33941 - DNA, 21 bp, Artificial Sequence
  Description of Artificial Sequence: Synthetic oligonucleotide
ctcaacggaagaagagcagaa

SEQ ID NO: 33942 - DNA, 21 bp, Artificial Sequence
  Description of Artificial Sequence: Synthetic oligonucleotide
ctcaacggaagctacatccaa

SEQ ID NO: 33943 - DNA, 21 bp, Artificial Sequence
  Description of Artificial Sequence: Synthetic oligonucleotide
ctcaaccacgaaaaagacgga

SEQ ID NO: 33944 - DNA, 21 bp, Artificial Sequence
  Description of Artificial Sequence: Synthetic oligonucleotide
ctcaaccacaacccaggactc

SEQ ID NO: 33945 - DNA, 21 bp, Artificial Sequence
  Description of Artificial Sequence: Synthetic oligonucleotide
ctcaaccacaacagcctcaga

SEQ ID NO: 33946 - DNA, 21 bp, Artificial Sequence
  Description of Artificial Sequence: Synthetic oligonucleotide
ctcaaccacacaagaccactc

SEQ ID NO: 33947 - DNA, 21 bp, Artificial Sequence
  Description of Artificial Sequence: Synthetic oligonucleotide
ctcaacatcccaagcgaccca

SEQ ID NO: 33948 - DNA, 21 bp, Artificial Sequence
  Description of Artificial Sequence: Synthetic oligonucleotide
ctcaacatcacaacaagcgga

SEQ ID NO: 33949 - DNA, 21 bp, Artificial Sequence
  Description of Artificial Sequence: Synthetic oligonucleotide
ctcaacaaagaattcgcaagc

SEQ ID NO: 33950 - DNA, 21 bp, Artificial Sequence
  Description of Artificial Sequence: Synthetic oligonucleotide
ctcaacaaaaacagcccagtc

SEQ ID NO: 33951 - DNA, 21 bp, Artificial Sequence
  Description of Artificial Sequence: Synthetic oligonucleotide
ctcaacaaacaaccattcgtc

SEQ ID NO: 33952 - DNA, 21 bp, Artificial Sequence
  Description of Artificial Sequence: Synthetic oligonucleotide
ctcaacaaaagagcaccagac

SEQ ID NO: 33953 - DNA, 21 bp, Artificial Sequence
  Description of Artificial Sequence: Synthetic oligonucleotide
ctcaacaaaagcagcacagga

SEQ ID NO: 33954 - DNA, 21 bp, Artificial Sequence
  Description of Artificial Sequence: Synthetic oligonucleotide
ctcaacctcgcaagaccagca

SEQ ID NO: 33955 - DNA, 21 bp, Artificial Sequence
  Description of Artificial Sequence: Synthetic oligonucleotide
ctcaacctcgaactctacgac

SEQ ID NO: 33956 - DNA, 21 bp, Artificial Sequence
  Description of Artificial Sequence: Synthetic oligonucleotide
ctcaacctcggaagaccagac

SEQ ID NO: 33957 - DNA, 21 bp, Artificial Sequence
  Description of Artificial Sequence: Synthetic oligonucleotide
ctcaacctccacgcaccaaca

SEQ ID NO: 33958 - DNA, 21 bp, Artificial Sequence
  Description of Artificial Sequence: Synthetic oligonucleotide
ctcaacctcccaaaccacgga

SEQ ID NO: 33959 - DNA, 21 bp, Artificial Sequence
  Description of Artificial Sequence: Synthetic oligonucleotide
ctcaacctccaaagccaaagc

SEQ ID NO: 33960 - DNA, 21 bp, Artificial Sequence
  Description of Artificial Sequence: Synthetic oligonucleotide
ctcaacctcagcggactcgtc

SEQ ID NO: 33961 - DNA, 21 bp, Artificial Sequence
  Description of Artificial Sequence: Synthetic oligonucleotide
ctcaacctcacaagcgtcagc

SEQ ID NO: 33962 - DNA, 21 bp, Artificial Sequence
  Description of Artificial Sequence: Synthetic oligonucleotide
ctcaacatgagcgaaccaaga

SEQ ID NO: 33963 - DNA, 21 bp, Artificial Sequence
  Description of Artificial Sequence: Synthetic oligonucleotide
ctcaacatgagcccaacagga

SEQ ID NO: 33964 - DNA, 21 bp, Artificial Sequence
  Description of Artificial Sequence: Synthetic oligonucleotide
ctcaacaaccaccaattcagc

SEQ ID NO: 33965 - DNA, 21 bp, Artificial Sequence
  Description of Artificial Sequence: Synthetic oligonucleotide
ctcaacaacctcccaagcaga

SEQ ID NO: 33966 - DNA, 21 bp, Artificial Sequence
  Description of Artificial Sequence: Synthetic oligonucleotide
ctcaacccagcagcaagaatc

SEQ ID NO: 33967 - DNA, 21 bp, Artificial Sequence
  Description of Artificial Sequence: Synthetic oligonucleotide
ctcaacccagcaaaagcaagc

SEQ ID NO: 33968 - DNA, 21 bp, Artificial Sequence
  Description of Artificial Sequence: Synthetic oligonucleotide
ctcaacccacacgaaaacgga

SEQ ID NO: 33969 - DNA, 21 bp, Artificial Sequence
  Description of Artificial Sequence: Synthetic oligonucleotide
ctcaacccaagcagagtccca

SEQ ID NO: 33970 - DNA, 21 bp, Artificial Sequence
  Description of Artificial Sequence: Synthetic oligonucleotide
ctcaacccagtcaacgtcatg

SEQ ID NO: 33971 - DNA, 21 bp, Artificial Sequence
  Description of Artificial Sequence: Synthetic oligonucleotide
ctcaaccaaggaaacatgaca

SEQ ID NO: 33972 - DNA, 21 bp, Artificial Sequence
  Description of Artificial Sequence: Synthetic oligonucleotide
ctcaaccaacacgtcccagtc

SEQ ID NO: 33973 - DNA, 21 bp, Artificial Sequence
  Description of Artificial Sequence: Synthetic oligonucleotide
ctcaaccaaagcagaagcaca

SEQ ID NO: 33974 - DNA, 21 bp, Artificial Sequence
  Description of Artificial Sequence: Synthetic oligonucleotide
ctcaaccaaagcgtcagagtc

SEQ ID NO: 33975 - DNA, 21 bp, Artificial Sequence
  Description of Artificial Sequence: Synthetic oligonucleotide
ctcaacagagcagacgtcgac

SEQ ID NO: 33976 - DNA, 21 bp, Artificial Sequence
  Description of Artificial Sequence: Synthetic oligonucleotide
ctcaacagagacatgagctac

SEQ ID NO: 33977 - DNA, 21 bp, Artificial Sequence
  Description of Artificial Sequence: Synthetic oligonucleotide
ctcaacagagaacaagcaagc

SEQ ID NO: 33978 - DNA, 21 bp, Artificial Sequence
  Description of Artificial Sequence: Synthetic oligonucleotide
ctcaacagaagcagcatgcca

SEQ ID NO: 33979 - DNA, 21 bp, Artificial Sequence
  Description of Artificial Sequence: Synthetic oligonucleotide
ctcaacagaacaaacccagac

SEQ ID NO: 33980 - DNA, 21 bp, Artificial Sequence
  Description of Artificial Sequence: Synthetic oligonucleotide
ctcaacagagtcacaccaagc

SEQ ID NO: 33981 - DNA, 21 bp, Artificial Sequence
  Description of Artificial Sequence: Synthetic oligonucleotide
ctcaacagcgacgcaccatac

SEQ ID NO: 33982 - DNA, 21 bp, Artificial Sequence
  Description of Artificial Sequence: Synthetic oligonucleotide
ctcaacagcctcggaacattc

SEQ ID NO: 33983 - DNA, 21 bp, Artificial Sequence
  Description of Artificial Sequence: Synthetic oligonucleotide
ctcaacagcccactcatcgca

SEQ ID NO: 33984 - DNA, 21 bp, Artificial Sequence
  Description of Artificial Sequence: Synthetic oligonucleotide
ctcaacagccaaccaggactc

SEQ ID NO: 33985 - DNA, 21 bp, Artificial Sequence
  Description of Artificial Sequence: Synthetic oligonucleotide
ctcaacagccaaagattcgga

SEQ ID NO: 33986 - DNA, 21 bp, Artificial Sequence
  Description of Artificial Sequence: Synthetic oligonucleotide
ctcaacagcagccacgacgca

SEQ ID NO: 33987 - DNA, 21 bp, Artificial Sequence
  Description of Artificial Sequence: Synthetic oligonucleotide
ctcaacagcagcagaagcgca

SEQ ID NO: 33988 - DNA, 21 bp, Artificial Sequence
  Description of Artificial Sequence: Synthetic oligonucleotide
ctcaacagcagcagccacgga

SEQ ID NO: 33989 - DNA, 21 bp, Artificial Sequence
  Description of Artificial Sequence: Synthetic oligonucleotide
ctcaacagcacaaacccacac

SEQ ID NO: 33990 - DNA, 21 bp, Artificial Sequence
  Description of Artificial Sequence: Synthetic oligonucleotide
ctcaacagcgtcagaaacaac

SEQ ID NO: 33991 - DNA, 21 bp, Artificial Sequence
  Description of Artificial Sequence: Synthetic oligonucleotide
ctcaacacagcagcactccca

SEQ ID NO: 33992 - DNA, 21 bp, Artificial Sequence
  Description of Artificial Sequence: Synthetic oligonucleotide
ctcaacacacacagctacgtc

SEQ ID NO: 33993 - DNA, 21 bp, Artificial Sequence
  Description of Artificial Sequence: Synthetic oligonucleotide
ctcaacacaaaaccattcagc

SEQ ID NO: 33994 - DNA, 21 bp, Artificial Sequence
  Description of Artificial Sequence: Synthetic oligonucleotide
ctcaacacaagacaacaaaca

SEQ ID NO: 33995 - DNA, 21 bp, Artificial Sequence
  Description of Artificial Sequence: Synthetic oligonucleotide
ctcaacacaagaagcctcagc

SEQ ID NO: 33996 - DNA, 21 bp, Artificial Sequence
  Description of Artificial Sequence: Synthetic oligonucleotide
ctcaacgtcgaagtcgaaaga

SEQ ID NO: 33997 - DNA, 21 bp, Artificial Sequence
  Description of Artificial Sequence: Synthetic oligonucleotide
ctcaacgtcaaaagcggactc

SEQ ID NO: 33998 - DNA, 21 bp, Artificial Sequence
  Description of Artificial Sequence: Synthetic oligonucleotide
ctcaacgtcaacatcgcacca

SEQ ID NO: 33999 - DNA, 21 bp, Artificial Sequence
  Description of Artificial Sequence: Synthetic oligonucleotide
ctcaacgtcagagaaagcgtc

SEQ ID NO: 34000 - DNA, 21 bp, Artificial Sequence
  Description of Artificial Sequence: Synthetic oligonucleotide
ctcaacgtcagaagagtcgca

SEQ ID NO: 34001 - DNA, 21 bp, Artificial Sequence
  Description of Artificial Sequence: Synthetic oligonucleotide
ctcaacgtcagaacagacaga

SEQ ID NO: 34002 - DNA, 21 bp, Artificial Sequence
  Description of Artificial Sequence: Synthetic oligonucleotide
ctcaacgtcagcggaaacgca

SEQ ID NO: 34003 - DNA, 21 bp, Artificial Sequence
  Description of Artificial Sequence: Synthetic oligonucleotide
ctcaacgtcagcagcacagga

SEQ ID NO: 34004 - DNA, 21 bp, Artificial Sequence
  Description of Artificial Sequence: Synthetic oligonucleotide
ctcaacgtcgtcagcacatac

SEQ ID NO: 34005 - DNA, 21 bp, Artificial Sequence
  Description of Artificial Sequence: Synthetic oligonucleotide
ctcaactacgacccaatgaca

SEQ ID NO: 34006 - DNA, 21 bp, Artificial Sequence
  Description of Artificial Sequence: Synthetic oligonucleotide
ctcaactacggaccagcactc

SEQ ID NO: 34007 - DNA, 21 bp, Artificial Sequence
  Description of Artificial Sequence: Synthetic oligonucleotide
ctcaactaccacgcaagcgtc

SEQ ID NO: 34008 - DNA, 21 bp, Artificial Sequence
  Description of Artificial Sequence: Synthetic oligonucleotide
ctcccagcaggaaacacaagc

SEQ ID NO: 34009 - DNA, 21 bp, Artificial Sequence
  Description of Artificial Sequence: Synthetic oligonucleotide
ctcccagcaggaaactaccac

SEQ ID NO: 34010 - DNA, 21 bp, Artificial Sequence
  Description of Artificial Sequence: Synthetic oligonucleotide
ctcccagcaaacaacagcatc

SEQ ID NO: 34011 - DNA, 21 bp, Artificial Sequence
  Description of Artificial Sequence: Synthetic oligonucleotide
ctcccagcaccaaaaccagca

SEQ ID NO: 34012 - DNA, 21 bp, Artificial Sequence
  Description of Artificial Sequence: Synthetic oligonucleotide
ctcccagcaagactcgcaaca

SEQ ID NO: 34013 - DNA, 21 bp, Artificial Sequence
  Description of Artificial Sequence: Synthetic oligonucleotide
ctcccagcaagcggagcagca

SEQ ID NO: 34014 - DNA, 21 bp, Artificial Sequence
  Description of Artificial Sequence: Synthetic oligonucleotide
ctcccagcaacaagaagcatc

SEQ ID NO: 34015 - DNA, 21 bp, Artificial Sequence
  Description of Artificial Sequence: Synthetic oligonucleotide
ctcccagcagtctgcggacca

SEQ ID NO: 34016 - DNA, 21 bp, Artificial Sequence
  Description of Artificial Sequence: Synthetic oligonucleotide
ctcccagacaaaagcctcatg

SEQ ID NO: 34017 - DNA, 21 bp, Artificial Sequence
  Description of Artificial Sequence: Synthetic oligonucleotide
ctcccagacatgagcagagaa

SEQ ID NO: 34018 - DNA, 21 bp, Artificial Sequence
  Description of Artificial Sequence: Synthetic oligonucleotide
ctcccagacccaagaccagac

SEQ ID NO: 34019 - DNA, 21 bp, Artificial Sequence
  Description of Artificial Sequence: Synthetic oligonucleotide
ctcccagacacaatcagaagc

SEQ ID NO: 34020 - DNA, 21 bp, Artificial Sequence
  Description of Artificial Sequence: Synthetic oligonucleotide
ctcccagacacaagaacactc

SEQ ID NO: 34021 - DNA, 21 bp, Artificial Sequence
  Description of Artificial Sequence: Synthetic oligonucleotide
ctcccagacgtcgcaagatac

SEQ ID NO: 34022 - DNA, 21 bp, Artificial Sequence
  Description of Artificial Sequence: Synthetic oligonucleotide
ctcccagaagcaggagtccca

SEQ ID NO: 34023 - DNA, 21 bp, Artificial Sequence
  Description of Artificial Sequence: Synthetic oligonucleotide
ctcccagaaatcagcccacac

SEQ ID NO: 34024 - DNA, 21 bp, Artificial Sequence
  Description of Artificial Sequence: Synthetic oligonucleotide
ctcccagaaaacacaccatac

SEQ ID NO: 34025 - DNA, 21 bp, Artificial Sequence
  Description of Artificial Sequence: Synthetic oligonucleotide
ctcccagaacaaacagtcatc

SEQ ID NO: 34026 - DNA, 21 bp, Artificial Sequence
  Description of Artificial Sequence: Synthetic oligonucleotide
ctcccagaaagagtcggactc

SEQ ID NO: 34027 - DNA, 21 bp, Artificial Sequence
  Description of Artificial Sequence: Synthetic oligonucleotide
ctcccagaaacaggaatgagc

SEQ ID NO: 34028 - DNA, 21 bp, Artificial Sequence
  Description of Artificial Sequence: Synthetic oligonucleotide
ctcccattcgcaacaagccca

SEQ ID NO: 34029 - DNA, 21 bp, Artificial Sequence
  Description of Artificial Sequence: Synthetic oligonucleotide
ctcccaggagcaacaatcgaa

SEQ ID NO: 34030 - DNA, 21 bp, Artificial Sequence
  Description of Artificial Sequence: Synthetic oligonucleotide
ctcccaggaaaagtcacaaca

SEQ ID NO: 34031 - DNA, 21 bp, Artificial Sequence
  Description of Artificial Sequence: Synthetic oligonucleotide
ctcccaggaagagcagcacca

SEQ ID NO: 34032 - DNA, 21 bp, Artificial Sequence
  Description of Artificial Sequence: Synthetic oligonucleotide
ctcccaggaacaccaagagga

SEQ ID NO: 34033 - DNA, 21 bp, Artificial Sequence
  Description of Artificial Sequence: Synthetic oligonucleotide
ctcccaggaacagtcggagtc

SEQ ID NO: 34034 - DNA, 21 bp, Artificial Sequence
  Description of Artificial Sequence: Synthetic oligonucleotide
ctcccaggatggccactcgac

SEQ ID NO: 34035 - DNA, 21 bp, Artificial Sequence
  Description of Artificial Sequence: Synthetic oligonucleotide
ctcccacacccaagccaaaac

SEQ ID NO: 34036 - DNA, 21 bp, Artificial Sequence
  Description of Artificial Sequence: Synthetic oligonucleotide
ctcccacacagaccaaacagc

SEQ ID NO: 34037 - DNA, 21 bp, Artificial Sequence
  Description of Artificial Sequence: Synthetic oligonucleotide
ctcccacacagcacaccaatg

SEQ ID NO: 34038 - DNA, 21 bp, Artificial Sequence
  Description of Artificial Sequence: Synthetic oligonucleotide
ctcccaatcgcaacaagcaaa

SEQ ID NO: 34039 - DNA, 21 bp, Artificial Sequence
  Description of Artificial Sequence: Synthetic oligonucleotide
ctcccaatcggaaaacaagtc

SEQ ID NO: 34040 - DNA, 21 bp, Artificial Sequence
  Description of Artificial Sequence: Synthetic oligonucleotide
ctcccaatcctcacaagccac

SEQ ID NO: 34041 - DNA, 21 bp, Artificial Sequence
  Description of Artificial Sequence: Synthetic oligonucleotide
ctcccaatcctcacaagcagc

SEQ ID NO: 34042 - DNA, 21 bp, Artificial Sequence
  Description of Artificial Sequence: Synthetic oligonucleotide
ctcccaatcaaccacaaattc

SEQ ID NO: 34043 - DNA, 21 bp, Artificial Sequence
  Description of Artificial Sequence: Synthetic oligonucleotide
ctcccaatcccagtcgacgca

SEQ ID NO: 34044 - DNA, 21 bp, Artificial Sequence
  Description of Artificial Sequence: Synthetic oligonucleotide
ctcccaatcagcctccaacca

SEQ ID NO: 34045 - DNA, 21 bp, Artificial Sequence
  Description of Artificial Sequence: Synthetic oligonucleotide
ctcccaatcacatacgcagac

SEQ ID NO: 34046 - DNA, 21 bp, Artificial Sequence
  Description of Artificial Sequence: Synthetic oligonucleotide
ctcccaaaagcaagcacaagc

SEQ ID NO: 34047 - DNA, 21 bp, Artificial Sequence
  Description of Artificial Sequence: Synthetic oligonucleotide
ctcccaaaattcagagaccaa

SEQ ID NO: 34048 - DNA, 21 bp, Artificial Sequence
  Description of Artificial Sequence: Synthetic oligonucleotide
ctcccaaaaatcgacaacaca

SEQ ID NO: 34049 - DNA, 21 bp, Artificial Sequence
  Description of Artificial Sequence: Synthetic oligonucleotide
ctcccaaaaaactacgacgca

SEQ ID NO: 34050 - DNA, 21 bp, Artificial Sequence
  Description of Artificial Sequence: Synthetic oligonucleotide
ctcccaaaaagcagcgacgca

SEQ ID NO: 34051 - DNA, 21 bp, Artificial Sequence
  Description of Artificial Sequence: Synthetic oligonucleotide
ctcccaaaagtcgtcgcaaca

SEQ ID NO: 34052 - DNA, 21 bp, Artificial Sequence
  Description of Artificial Sequence: Synthetic oligonucleotide
ctcccactcgcacaacaacca

SEQ ID NO: 34053 - DNA, 21 bp, Artificial Sequence
  Description of Artificial Sequence: Synthetic oligonucleotide
ctcccactcgcagtctacgac

SEQ ID NO: 34054 - DNA, 21 bp, Artificial Sequence
  Description of Artificial Sequence: Synthetic oligonucleotide
ctcccactcggaaacagaatg

SEQ ID NO: 34055 - DNA, 21 bp, Artificial Sequence
  Description of Artificial Sequence: Synthetic oligonucleotide
ctcccactccacagaagcagc

SEQ ID NO: 34056 - DNA, 21 bp, Artificial Sequence
  Description of Artificial Sequence: Synthetic oligonucleotide
ctcccactccacagcccaaga

SEQ ID NO: 34057 - DNA, 21 bp, Artificial Sequence
  Description of Artificial Sequence: Synthetic oligonucleotide
ctcccactcatcttcacagaa

SEQ ID NO: 34058 - DNA, 21 bp, Artificial Sequence
  Description of Artificial Sequence: Synthetic oligonucleotide
ctcccactcaaaggagcagac

SEQ ID NO: 34059 - DNA, 21 bp, Artificial Sequence
  Description of Artificial Sequence: Synthetic oligonucleotide
ctcccactcatgaaaccagga

SEQ ID NO: 34060 - DNA, 21 bp, Artificial Sequence
  Description of Artificial Sequence: Synthetic oligonucleotide
ctcccactcaacttcgacaga

SEQ ID NO: 34061 - DNA, 21 bp, Artificial Sequence
  Description of Artificial Sequence: Synthetic oligonucleotide
ctcccactcaacaaaagccac

SEQ ID NO: 34062 - DNA, 21 bp, Artificial Sequence
  Description of Artificial Sequence: Synthetic oligonucleotide
ctcccactcaacacatacaca

SEQ ID NO: 34063 - DNA, 21 bp, Artificial Sequence
  Description of Artificial Sequence: Synthetic oligonucleotide
ctcccactcccaccatacgtc

SEQ ID NO: 34064 - DNA, 21 bp, Artificial Sequence
  Description of Artificial Sequence: Synthetic oligonucleotide
ctcccactcccaacaagcgga

SEQ ID NO: 34065 - DNA, 21 bp, Artificial Sequence
  Description of Artificial Sequence: Synthetic oligonucleotide
ctcccactcagagaaccaaaa

SEQ ID NO: 34066 - DNA, 21 bp, Artificial Sequence
  Description of Artificial Sequence: Synthetic oligonucleotide
ctcccactcagaatgagcgac

SEQ ID NO: 34067 - DNA, 21 bp, Artificial Sequence
  Description of Artificial Sequence: Synthetic oligonucleotide
ctcccactcagcccaatgcac

SEQ ID NO: 34068 - DNA, 21 bp, Artificial Sequence
  Description of Artificial Sequence: Synthetic oligonucleotide
ctcccaatggacctcgtcgca

SEQ ID NO: 34069 - DNA, 21 bp, Artificial Sequence
  Description of Artificial Sequence: Synthetic oligonucleotide
ctcccaatgatggcacacctc

SEQ ID NO: 34070 - DNA, 21 bp, Artificial Sequence
  Description of Artificial Sequence: Synthetic oligonucleotide
ctcccaatgagccacctccca

SEQ ID NO: 34071 - DNA, 21 bp, Artificial Sequence
  Description of Artificial Sequence: Synthetic oligonucleotide
ctcccaaacgcatacatgcac

SEQ ID NO: 34072 - DNA, 21 bp, Artificial Sequence
  Description of Artificial Sequence: Synthetic oligonucleotide
ctcccaaacgaaccaagcgac

SEQ ID NO: 34073 - DNA, 21 bp, Artificial Sequence
  Description of Artificial Sequence: Synthetic oligonucleotide
ctcccaaaccacatcagccca

SEQ ID NO: 34074 - DNA, 21 bp, Artificial Sequence
  Description of Artificial Sequence: Synthetic oligonucleotide
ctcccaaacctcagagaccaa

SEQ ID NO: 34075 - DNA, 21 bp, Artificial Sequence
  Description of Artificial Sequence: Synthetic oligonucleotide
ctcccaaacaacagcagagac

SEQ ID NO: 34076 - DNA, 21 bp, Artificial Sequence
  Description of Artificial Sequence: Synthetic oligonucleotide
ctcccaaacccaagaagcgac

SEQ ID NO: 34077 - DNA, 21 bp, Artificial Sequence
  Description of Artificial Sequence: Synthetic oligonucleotide
ctcccaaacagcgtcttcaca

SEQ ID NO: 34078 - DNA, 21 bp, Artificial Sequence
  Description of Artificial Sequence: Synthetic oligonucleotide
ctcccaccagcagcacacaga

SEQ ID NO: 34079 - DNA, 21 bp, Artificial Sequence
  Description of Artificial Sequence: Synthetic oligonucleotide
ctcccaccagcacacgcacac

SEQ ID NO: 34080 - DNA, 21 bp, Artificial Sequence
  Description of Artificial Sequence: Synthetic oligonucleotide
ctcccaccatgcctcacaaac

SEQ ID NO: 34081 - DNA, 21 bp, Artificial Sequence
  Description of Artificial Sequence: Synthetic oligonucleotide
ctcccaccagaacacagagga

SEQ ID NO: 34082 - DNA, 21 bp, Artificial Sequence
  Description of Artificial Sequence: Synthetic oligonucleotide
ctcccaccagaaacattccca

SEQ ID NO: 34083 - DNA, 21 bp, Artificial Sequence
  Description of Artificial Sequence: Synthetic oligonucleotide
ctcccaccaggaccagcaaca

SEQ ID NO: 34084 - DNA, 21 bp, Artificial Sequence
  Description of Artificial Sequence: Synthetic oligonucleotide
ctcccaccacacggaaacgtc

SEQ ID NO: 34085 - DNA, 21 bp, Artificial Sequence
  Description of Artificial Sequence: Synthetic oligonucleotide
ctcccaccacacggaagcgca

SEQ ID NO: 34086 - DNA, 21 bp, Artificial Sequence
  Description of Artificial Sequence: Synthetic oligonucleotide
ctcccaccacacggatacgca

SEQ ID NO: 34087 - DNA, 21 bp, Artificial Sequence
  Description of Artificial Sequence: Synthetic oligonucleotide
ctcccaccactcgtccaatac

SEQ ID NO: 34088 - DNA, 21 bp, Artificial Sequence
  Description of Artificial Sequence: Synthetic oligonucleotide
ctcccaccaaacggacacaga

SEQ ID NO: 34089 - DNA, 21 bp, Artificial Sequence
  Description of Artificial Sequence: Synthetic oligonucleotide
ctcccaccaaacaaattcatg

SEQ ID NO: 34090 - DNA, 21 bp, Artificial Sequence
  Description of Artificial Sequence: Synthetic oligonucleotide
ctcccaccaagagacgacaga

SEQ ID NO: 34091 - DNA, 21 bp, Artificial Sequence
  Description of Artificial Sequence: Synthetic oligonucleotide
ctcccaccaagaagcagctac

SEQ ID NO: 34092 - DNA, 21 bp, Artificial Sequence
  Description of Artificial Sequence: Synthetic oligonucleotide
ctcccaccaagccacgcaatg

SEQ ID NO: 34093 - DNA, 21 bp, Artificial Sequence
  Description of Artificial Sequence: Synthetic oligonucleotide
ctcccaccaagcatcgacaac

SEQ ID NO: 34094 - DNA, 21 bp, Artificial Sequence
  Description of Artificial Sequence: Synthetic oligonucleotide
ctcccaccatacagaggacca

SEQ ID NO: 34095 - DNA, 21 bp, Artificial Sequence
  Description of Artificial Sequence: Synthetic oligonucleotide
ctcccaccatacagcccagca

SEQ ID NO: 34096 - DNA, 21 bp, Artificial Sequence
  Description of Artificial Sequence: Synthetic oligonucleotide
ctcccacaaccaggagcagca

SEQ ID NO: 34097 - DNA, 21 bp, Artificial Sequence
  Description of Artificial Sequence: Synthetic oligonucleotide
ctcccacaaagaacaagccac

SEQ ID NO: 34098 - DNA, 21 bp, Artificial Sequence
  Description of Artificial Sequence: Synthetic oligonucleotide
ctcccaagagaaccactcaca

SEQ ID NO: 34099 - DNA, 21 bp, Artificial Sequence
  Description of Artificial Sequence: Synthetic oligonucleotide
ctcccaagattcccagtcgac

SEQ ID NO: 34100 - DNA, 21 bp, Artificial Sequence
  Description of Artificial Sequence: Synthetic oligonucleotide
ctcccaagaggaatgacaagc

SEQ ID NO: 34101 - DNA, 21 bp, Artificial Sequence
  Description of Artificial Sequence: Synthetic oligonucleotide
ctcccaagacaccaacaaaca

SEQ ID NO: 34102 - DNA, 21 bp, Artificial Sequence
  Description of Artificial Sequence: Synthetic oligonucleotide
ctcccaagaatcccaacagga

SEQ ID NO: 34103 - DNA, 21 bp, Artificial Sequence
  Description of Artificial Sequence: Synthetic oligonucleotide
ctcccaagactcatggcacca

SEQ ID NO: 34104 - DNA, 21 bp, Artificial Sequence
  Description of Artificial Sequence: Synthetic oligonucleotide
ctcccaagacaagcagcactc

SEQ ID NO: 34105 - DNA, 21 bp, Artificial Sequence
  Description of Artificial Sequence: Synthetic oligonucleotide
ctcccaagaagccaattcatc

SEQ ID NO: 34106 - DNA, 21 bp, Artificial Sequence
  Description of Artificial Sequence: Synthetic oligonucleotide
ctcccaagagtcaacgcagga

SEQ ID NO: 34107 - DNA, 21 bp, Artificial Sequence
  Description of Artificial Sequence: Synthetic oligonucleotide
ctcccaagcgcagacagagtc

SEQ ID NO: 34108 - DNA, 21 bp, Artificial Sequence
  Description of Artificial Sequence: Synthetic oligonucleotide
ctcccaagctgcatcggacca

SEQ ID NO: 34109 - DNA, 21 bp, Artificial Sequence
  Description of Artificial Sequence: Synthetic oligonucleotide
ctcccaagcttcaacggaagc

SEQ ID NO: 34110 - DNA, 21 bp, Artificial Sequence
  Description of Artificial Sequence: Synthetic oligonucleotide
ctcccaagcatcctcctccca

SEQ ID NO: 34111 - DNA, 21 bp, Artificial Sequence
  Description of Artificial Sequence: Synthetic oligonucleotide
ctcccaagcatcccaagaaca

SEQ ID NO: 34112 - DNA, 21 bp, Artificial Sequence
  Description of Artificial Sequence: Synthetic oligonucleotide
ctcccaagcatgagcctcagc

SEQ ID NO: 34113 - DNA, 21 bp, Artificial Sequence
  Description of Artificial Sequence: Synthetic oligonucleotide
ctcccaagcaacgcagtcagc

SEQ ID NO: 34114 - DNA, 21 bp, Artificial Sequence
  Description of Artificial Sequence: Synthetic oligonucleotide
ctcccaagcaacacaagactc

SEQ ID NO: 34115 - DNA, 21 bp, Artificial Sequence
  Description of Artificial Sequence: Synthetic oligonucleotide
ctcccaagcccaccaggagtc

SEQ ID NO: 34116 - DNA, 21 bp, Artificial Sequence
  Description of Artificial Sequence: Synthetic oligonucleotide
ctcccaagcccaccaatcagc

SEQ ID NO: 34117 - DNA, 21 bp, Artificial Sequence
  Description of Artificial Sequence: Synthetic oligonucleotide
ctcccaagccaactcatcgga

SEQ ID NO: 34118 - DNA, 21 bp, Artificial Sequence
  Description of Artificial Sequence: Synthetic oligonucleotide
ctcccaagcagagcattcagc

SEQ ID NO: 34119 - DNA, 21 bp, Artificial Sequence
  Description of Artificial Sequence: Synthetic oligonucleotide
ctcccaagcagcacaccaaac

SEQ ID NO: 34120 - DNA, 21 bp, Artificial Sequence
  Description of Artificial Sequence: Synthetic oligonucleotide
ctcccaagcagcgtctacaca

SEQ ID NO: 34121 - DNA, 21 bp, Artificial Sequence
  Description of Artificial Sequence: Synthetic oligonucleotide
ctcccaagcacatgcggaaaa

SEQ ID NO: 34122 - DNA, 21 bp, Artificial Sequence
  Description of Artificial Sequence: Synthetic oligonucleotide
ctcccaagcacaggaggactc

SEQ ID NO: 34123 - DNA, 21 bp, Artificial Sequence
  Description of Artificial Sequence: Synthetic oligonucleotide
ctcccaagcacaccaccaaga

SEQ ID NO: 34124 - DNA, 21 bp, Artificial Sequence
  Description of Artificial Sequence: Synthetic oligonucleotide
ctcccaagctacaacgcaagc

SEQ ID NO: 34125 - DNA, 21 bp, Artificial Sequence
  Description of Artificial Sequence: Synthetic oligonucleotide
ctcccaacacacctcgaagca

SEQ ID NO: 34126 - DNA, 21 bp, Artificial Sequence
  Description of Artificial Sequence: Synthetic oligonucleotide
ctcccaacaatcaacgcagtc

SEQ ID NO: 34127 - DNA, 21 bp, Artificial Sequence
  Description of Artificial Sequence: Synthetic oligonucleotide
ctcccaacaaaagaagcagtc

SEQ ID NO: 34128 - DNA, 21 bp, Artificial Sequence
  Description of Artificial Sequence: Synthetic oligonucleotide
ctcccaacactcagaatccca

SEQ ID NO: 34129 - DNA, 21 bp, Artificial Sequence
  Description of Artificial Sequence: Synthetic oligonucleotide
ctcccaacactcagctacgtc

SEQ ID NO: 34130 - DNA, 21 bp, Artificial Sequence
  Description of Artificial Sequence: Synthetic oligonucleotide
ctcccaacaatgcacaacaca

SEQ ID NO: 34131 - DNA, 21 bp, Artificial Sequence
  Description of Artificial Sequence: Synthetic oligonucleotide
ctcccaacaaacaaaggaatc

SEQ ID NO: 34132 - DNA, 21 bp, Artificial Sequence
  Description of Artificial Sequence: Synthetic oligonucleotide
ctcccaacaaactacgcagca

SEQ ID NO: 34133 - DNA, 21 bp, Artificial Sequence
  Description of Artificial Sequence: Synthetic oligonucleotide
ctcccaacaccattcagcagc

SEQ ID NO: 34134 - DNA, 21 bp, Artificial Sequence
  Description of Artificial Sequence: Synthetic oligonucleotide
ctcccaacaccactcacaagc

SEQ ID NO: 34135 - DNA, 21 bp, Artificial Sequence
  Description of Artificial Sequence: Synthetic oligonucleotide
ctcccaacaagcccaagcgca

SEQ ID NO: 34136 - DNA, 21 bp, Artificial Sequence
  Description of Artificial Sequence: Synthetic oligonucleotide
ctcccaacaagcacaagcatc

SEQ ID NO: 34137 - DNA, 21 bp, Artificial Sequence
  Description of Artificial Sequence: Synthetic oligonucleotide
ctcccaacaagcgtcgtcctc

SEQ ID NO: 34138 - DNA, 21 bp, Artificial Sequence
  Description of Artificial Sequence: Synthetic oligonucleotide
ctcccagtcggagacccactc

SEQ ID NO: 34139 - DNA, 21 bp, Artificial Sequence
  Description of Artificial Sequence: Synthetic oligonucleotide
ctcccagtcaacatcgtcgga

SEQ ID NO: 34140 - DNA, 21 bp, Artificial Sequence
  Description of Artificial Sequence: Synthetic oligonucleotide
ctcccagtcagcgacagatac

SEQ ID NO: 34141 - DNA, 21 bp, Artificial Sequence
  Description of Artificial Sequence: Synthetic oligonucleotide
ctcccagtcagcagcagacac

SEQ ID NO: 34142 - DNA, 21 bp, Artificial Sequence
  Description of Artificial Sequence: Synthetic oligonucleotide
ctcccagtcagcacaagacac

SEQ ID NO: 34143 - DNA, 21 bp, Artificial Sequence
  Description of Artificial Sequence: Synthetic oligonucleotide
ctcccagtcgtcaacgcaagc

SEQ ID NO: 34144 - DNA, 21 bp, Artificial Sequence
  Description of Artificial Sequence: Synthetic oligonucleotide
ctcccatacacagtcggaaca

SEQ ID NO: 34145 - DNA, 21 bp, Artificial Sequence
  Description of Artificial Sequence: Synthetic oligonucleotide
ctccaagcaagaacactcaac

SEQ ID NO: 34146 - DNA, 21 bp, Artificial Sequence
  Description of Artificial Sequence: Synthetic oligonucleotide
ctccaagcaagcaaagcagac

SEQ ID NO: 34147 - DNA, 21 bp, Artificial Sequence
  Description of Artificial Sequence: Synthetic oligonucleotide
ctccaagcaagcaacgacatc

SEQ ID NO: 34148 - DNA, 21 bp, Artificial Sequence
  Description of Artificial Sequence: Synthetic oligonucleotide
ctccaagcaacaagaggagca

SEQ ID NO: 34149 - DNA, 21 bp, Artificial Sequence
  Description of Artificial Sequence: Synthetic oligonucleotide
ctccaagacgcagtctgcaac

SEQ ID NO: 34150 - DNA, 21 bp, Artificial Sequence
  Description of Artificial Sequence: Synthetic oligonucleotide
ctccaagacccaagaagccca

SEQ ID NO: 34151 - DNA, 21 bp, Artificial Sequence
  Description of Artificial Sequence: Synthetic oligonucleotide
ctccaagacgtcagcatggga

SEQ ID NO: 34152 - DNA, 21 bp, Artificial Sequence
  Description of Artificial Sequence: Synthetic oligonucleotide
ctccaagaaaaaagctgggaa

SEQ ID NO: 34153 - DNA, 21 bp, Artificial Sequence
  Description of Artificial Sequence: Synthetic oligonucleotide
ctccaagaaccaggaaacctc

SEQ ID NO: 34154 - DNA, 21 bp, Artificial Sequence
  Description of Artificial Sequence: Synthetic oligonucleotide
ctccaattcagcccaccaagc

SEQ ID NO: 34155 - DNA, 21 bp, Artificial Sequence
  Description of Artificial Sequence: Synthetic oligonucleotide
ctccaaggagcattcgcaagc

SEQ ID NO: 34156 - DNA, 21 bp, Artificial Sequence
  Description of Artificial Sequence: Synthetic oligonucleotide
ctccaaggaagcagacaaatc

SEQ ID NO: 34157 - DNA, 21 bp, Artificial Sequence
  Description of Artificial Sequence: Synthetic oligonucleotide
ctccaaggatggcacgcacaa

SEQ ID NO: 34158 - DNA, 21 bp, Artificial Sequence
  Description of Artificial Sequence: Synthetic oligonucleotide
ctccaacaccacagcaacgga

SEQ ID NO: 34159 - DNA, 21 bp, Artificial Sequence
  Description of Artificial Sequence: Synthetic oligonucleotide
ctccaacacctccaaccaagc

SEQ ID NO: 34160 - DNA, 21 bp, Artificial Sequence
  Description of Artificial Sequence: Synthetic oligonucleotide
ctccaaaaaatggtcccactc

SEQ ID NO: 34161 - DNA, 21 bp, Artificial Sequence
  Description of Artificial Sequence: Synthetic oligonucleotide
ctccaaaaaccaacaatgagc

SEQ ID NO: 34162 - DNA, 21 bp, Artificial Sequence
  Description of Artificial Sequence: Synthetic oligonucleotide
ctccaaaaaccaacaagcgca

SEQ ID NO: 34163 - DNA, 21 bp, Artificial Sequence
  Description of Artificial Sequence: Synthetic oligonucleotide
ctccaactcaaccaacaaaaa

SEQ ID NO: 34164 - DNA, 21 bp, Artificial Sequence
  Description of Artificial Sequence: Synthetic oligonucleotide
ctccaactcagacaaacaagc

SEQ ID NO: 34165 - DNA, 21 bp, Artificial Sequence
  Description of Artificial Sequence: Synthetic oligonucleotide
ctccaactcacaagaggagaa

SEQ ID NO: 34166 - DNA, 21 bp, Artificial Sequence
  Description of Artificial Sequence: Synthetic oligonucleotide
ctccaaatggcaagaggagga

SEQ ID NO: 34167 - DNA, 21 bp, Artificial Sequence
  Description of Artificial Sequence: Synthetic oligonucleotide
ctccaaatgagaccaatgaca

SEQ ID NO: 34168 - DNA, 21 bp, Artificial Sequence
  Description of Artificial Sequence: Synthetic oligonucleotide
ctccaaaacggatgcaaaagc

SEQ ID NO: 34169 - DNA, 21 bp, Artificial Sequence
  Description of Artificial Sequence: Synthetic oligonucleotide
ctccaaaacacaagcagcagc

SEQ ID NO: 34170 - DNA, 21 bp, Artificial Sequence
  Description of Artificial Sequence: Synthetic oligonucleotide
ctccaaccattcaaacaccaa

SEQ ID NO: 34171 - DNA, 21 bp, Artificial Sequence
  Description of Artificial Sequence: Synthetic oligonucleotide
ctccaaccaagagaaccagtc

SEQ ID NO: 34172 - DNA, 21 bp, Artificial Sequence
  Description of Artificial Sequence: Synthetic oligonucleotide
ctccaaccaagcagcagaaca

SEQ ID NO: 34173 - DNA, 21 bp, Artificial Sequence
  Description of Artificial Sequence: Synthetic oligonucleotide
ctccaaccaacaggagaagca

SEQ ID NO: 34174 - DNA, 21 bp, Artificial Sequence
  Description of Artificial Sequence: Synthetic oligonucleotide
ctccaacaaacaggactcaga

SEQ ID NO: 34175 - DNA, 21 bp, Artificial Sequence
  Description of Artificial Sequence: Synthetic oligonucleotide
ctccaaagagcaaacatggtc

SEQ ID NO: 34176 - DNA, 21 bp, Artificial Sequence
  Description of Artificial Sequence: Synthetic oligonucleotide
ctccaaagagaagcacacaca

SEQ ID NO: 34177 - DNA, 21 bp, Artificial Sequence
  Description of Artificial Sequence: Synthetic oligonucleotide
ctccaaagaagcagaggacca

SEQ ID NO: 34178 - DNA, 21 bp, Artificial Sequence
  Description of Artificial Sequence: Synthetic oligonucleotide
ctccaaagcgcaagagcacca

SEQ ID NO: 34179 - DNA, 21 bp, Artificial Sequence
  Description of Artificial Sequence: Synthetic oligonucleotide
ctccaaagcttcagcagccca

SEQ ID NO: 34180 - DNA, 21 bp, Artificial Sequence
  Description of Artificial Sequence: Synthetic oligonucleotide
ctccaaagcggaccacaacca

SEQ ID NO: 34181 - DNA, 21 bp, Artificial Sequence
  Description of Artificial Sequence: Synthetic oligonucleotide
ctccaaagcccagaaaacgaa

SEQ ID NO: 34182 - DNA, 21 bp, Artificial Sequence
  Description of Artificial Sequence: Synthetic oligonucleotide
ctccaaagctacacaccacca

SEQ ID NO: 34183 - DNA, 21 bp, Artificial Sequence
  Description of Artificial Sequence: Synthetic oligonucleotide
ctccaaacaggaagattcagc

SEQ ID NO: 34184 - DNA, 21 bp, Artificial Sequence
  Description of Artificial Sequence: Synthetic oligonucleotide
ctccaaacaaaaagcagcagc

SEQ ID NO: 34185 - DNA, 21 bp, Artificial Sequence
  Description of Artificial Sequence: Synthetic oligonucleotide
ctccaaacagtcgacatcgac

SEQ ID NO: 34186 - DNA, 21 bp, Artificial Sequence
  Description of Artificial Sequence: Synthetic oligonucleotide
ctccaagtcgacagcaacgtc

SEQ ID NO: 34187 - DNA, 21 bp, Artificial Sequence
  Description of Artificial Sequence: Synthetic oligonucleotide
ctccaagtcccaagcagcctc

SEQ ID NO: 34188 - DNA, 21 bp, Artificial Sequence
  Description of Artificial Sequence: Synthetic oligonucleotide
ctccaagtcagcggactcgac

SEQ ID NO: 34189 - DNA, 21 bp, Artificial Sequence
  Description of Artificial Sequence: Synthetic oligonucleotide
ctccaatacgcaacaagcgac

SEQ ID NO: 34190 - DNA, 21 bp, Artificial Sequence
  Description of Artificial Sequence: Synthetic oligonucleotide
ctcagagcagcagaaatcagc

SEQ ID NO: 34191 - DNA, 21 bp, Artificial Sequence
  Description of Artificial Sequence: Synthetic oligonucleotide
ctcagagcagcaaacgcactc

SEQ ID NO: 34192 - DNA, 21 bp, Artificial Sequence
  Description of Artificial Sequence: Synthetic oligonucleotide
ctcagagcagacggaaaagca

SEQ ID NO: 34193 - DNA, 21 bp, Artificial Sequence
  Description of Artificial Sequence: Synthetic oligonucleotide
ctcagagcaggaacagcacaa

SEQ ID NO: 34194 - DNA, 21 bp, Artificial Sequence
  Description of Artificial Sequence: Synthetic oligonucleotide
ctcagagcaggaacaagcagc

SEQ ID NO: 34195 - DNA, 21 bp, Artificial Sequence
  Description of Artificial Sequence: Synthetic oligonucleotide
ctcagagcaatcctcgaagaa

SEQ ID NO: 34196 - DNA, 21 bp, Artificial Sequence
  Description of Artificial Sequence: Synthetic oligonucleotide
ctcagagcactcacaggaagc

SEQ ID NO: 34197 - DNA, 21 bp, Artificial Sequence
  Description of Artificial Sequence: Synthetic oligonucleotide
ctcagagcacaaaacgacgca

SEQ ID NO: 34198 - DNA, 21 bp, Artificial Sequence
  Description of Artificial Sequence: Synthetic oligonucleotide
ctcagagcaacaaacagcctc

SEQ ID NO: 34199 - DNA, 21 bp, Artificial Sequence
  Description of Artificial Sequence: Synthetic oligonucleotide
ctcagagacggacaaagacca

SEQ ID NO: 34200 - DNA, 21 bp, Artificial Sequence
  Description of Artificial Sequence: Synthetic oligonucleotide
ctcagagacggaagagcaagc

SEQ ID NO: 34201 - DNA, 21 bp, Artificial Sequence
  Description of Artificial Sequence: Synthetic oligonucleotide
ctcagagaccacggaggacac

SEQ ID NO: 34202 - DNA, 21 bp, Artificial Sequence
  Description of Artificial Sequence: Synthetic oligonucleotide
ctcagagacagagacttcaaa

SEQ ID NO: 34203 - DNA, 21 bp, Artificial Sequence
  Description of Artificial Sequence: Synthetic oligonucleotide
ctcagagacagagacgtcctc

SEQ ID NO: 34204 - DNA, 21 bp, Artificial Sequence
  Description of Artificial Sequence: Synthetic oligonucleotide
ctcagagacagcaacaaaaac

SEQ ID NO: 34205 - DNA, 21 bp, Artificial Sequence
  Description of Artificial Sequence: Synthetic oligonucleotide
ctcagagacagcgtccaagtc

SEQ ID NO: 34206 - DNA, 21 bp, Artificial Sequence
  Description of Artificial Sequence: Synthetic oligonucleotide
ctcagagaacacggaccagtc

SEQ ID NO: 34207 - DNA, 21 bp, Artificial Sequence
  Description of Artificial Sequence: Synthetic oligonucleotide
ctcagagaaatgccactccca

SEQ ID NO: 34208 - DNA, 21 bp, Artificial Sequence
  Description of Artificial Sequence: Synthetic oligonucleotide
ctcagagaaaacatgagcaac

SEQ ID NO: 34209 - DNA, 21 bp, Artificial Sequence
  Description of Artificial Sequence: Synthetic oligonucleotide
ctcagagaaccaacaggattc

SEQ ID NO: 34210 - DNA, 21 bp, Artificial Sequence
  Description of Artificial Sequence: Synthetic oligonucleotide
ctcagagaaccagtcatccaa

SEQ ID NO: 34211 - DNA, 21 bp, Artificial Sequence
  Description of Artificial Sequence: Synthetic oligonucleotide
ctcagagaaagccaaagaatc

SEQ ID NO: 34212 - DNA, 21 bp, Artificial Sequence
  Description of Artificial Sequence: Synthetic oligonucleotide
ctcagattcccaggaacacca

SEQ ID NO: 34213 - DNA, 21 bp, Artificial Sequence
  Description of Artificial Sequence: Synthetic oligonucleotide
ctcagattccaaagcacacca

SEQ ID NO: 34214 - DNA, 21 bp, Artificial Sequence
  Description of Artificial Sequence: Synthetic oligonucleotide
ctcagaggagcaatcgcacca

SEQ ID NO: 34215 - DNA, 21 bp, Artificial Sequence
  Description of Artificial Sequence: Synthetic oligonucleotide
ctcagaggagacgcaagcgaa

SEQ ID NO: 34216 - DNA, 21 bp, Artificial Sequence
  Description of Artificial Sequence: Synthetic oligonucleotide
ctcagaggagaaagcagccca

SEQ ID NO: 34217 - DNA, 21 bp, Artificial Sequence
  Description of Artificial Sequence: Synthetic oligonucleotide
ctcagaggaggaatggaccca

SEQ ID NO: 34218 - DNA, 21 bp, Artificial Sequence
  Description of Artificial Sequence: Synthetic oligonucleotide
ctcagaggaaacgtcgaagca

SEQ ID NO: 34219 - DNA, 21 bp, Artificial Sequence
  Description of Artificial Sequence: Synthetic oligonucleotide
ctcagaggaccaacaacagtc

SEQ ID NO: 34220 - DNA, 21 bp, Artificial Sequence
  Description of Artificial Sequence: Synthetic oligonucleotide
ctcagaggacaactcagcaac

SEQ ID NO: 34221 - DNA, 21 bp, Artificial Sequence
  Description of Artificial Sequence: Synthetic oligonucleotide
ctcagaggaagaagcagcgaa

SEQ ID NO: 34222 - DNA, 21 bp, Artificial Sequence
  Description of Artificial Sequence: Synthetic oligonucleotide
ctcagaggaagcctcgaacac

SEQ ID NO: 34223 - DNA, 21 bp, Artificial Sequence
  Description of Artificial Sequence: Synthetic oligonucleotide
ctcagaggaacaatggaaagc

SEQ ID NO: 34224 - DNA, 21 bp, Artificial Sequence
  Description of Artificial Sequence: Synthetic oligonucleotide
ctcagacacgacagcaacgca

SEQ ID NO: 34225 - DNA, 21 bp, Artificial Sequence
  Description of Artificial Sequence: Synthetic oligonucleotide
ctcagaatcagcacaagcgac

SEQ ID NO: 34226 - DNA, 21 bp, Artificial Sequence
  Description of Artificial Sequence: Synthetic oligonucleotide
ctcagaaaagaatacctcgga

SEQ ID NO: 34227 - DNA, 21 bp, Artificial Sequence
  Description of Artificial Sequence: Synthetic oligonucleotide
ctcagactcgacgaccaagca

SEQ ID NO: 34228 - DNA, 21 bp, Artificial Sequence
  Description of Artificial Sequence: Synthetic oligonucleotide
ctcagactccaccaagaaagc

SEQ ID NO: 34229 - DNA, 21 bp, Artificial Sequence
  Description of Artificial Sequence: Synthetic oligonucleotide
ctcagactcaaaaacgacgca

SEQ ID NO: 34230 - DNA, 21 bp, Artificial Sequence
  Description of Artificial Sequence: Synthetic oligonucleotide
ctcagactcccaccagcagaa

SEQ ID NO: 34231 - DNA, 21 bp, Artificial Sequence
  Description of Artificial Sequence: Synthetic oligonucleotide
ctcagactcagcgacaacaga

SEQ ID NO: 34232 - DNA, 21 bp, Artificial Sequence
  Description of Artificial Sequence: Synthetic oligonucleotide
ctcagactcacaggaagacca

SEQ ID NO: 34233 - DNA, 21 bp, Artificial Sequence
  Description of Artificial Sequence: Synthetic oligonucleotide
ctcagactcgtcagagaacca

SEQ ID NO: 34234 - DNA, 21 bp, Artificial Sequence
  Description of Artificial Sequence: Synthetic oligonucleotide
ctcagaaacgcagcaagcgtc

SEQ ID NO: 34235 - DNA, 21 bp, Artificial Sequence
  Description of Artificial Sequence: Synthetic oligonucleotide
ctcagaaacgcagacggagca

SEQ ID NO: 34236 - DNA, 21 bp, Artificial Sequence
  Description of Artificial Sequence: Synthetic oligonucleotide
ctcagaaacctcaacagctac

SEQ ID NO: 34237 - DNA, 21 bp, Artificial Sequence
  Description of Artificial Sequence: Synthetic oligonucleotide
ctcagaaacaacccactcgca

SEQ ID NO: 34238 - DNA, 21 bp, Artificial Sequence
  Description of Artificial Sequence: Synthetic oligonucleotide
ctcagaaacagaccaagcgaa

SEQ ID NO: 34239 - DNA, 21 bp, Artificial Sequence
  Description of Artificial Sequence: Synthetic oligonucleotide
ctcagaaacagcagcgtcgtc

SEQ ID NO: 34240 - DNA, 21 bp, Artificial Sequence
  Description of Artificial Sequence: Synthetic oligonucleotide
ctcagaaacacaccaatgagc

SEQ ID NO: 34241 - DNA, 21 bp, Artificial Sequence
  Description of Artificial Sequence: Synthetic oligonucleotide
ctcagaaacacagtcctcgga

SEQ ID NO: 34242 - DNA, 21 bp, Artificial Sequence
  Description of Artificial Sequence: Synthetic oligonucleotide
ctcagaaacgtcgcagaacac

SEQ ID NO: 34243 - DNA, 21 bp, Artificial Sequence
  Description of Artificial Sequence: Synthetic oligonucleotide
ctcagaccaaacggatacaca

SEQ ID NO: 34244 - DNA, 21 bp, Artificial Sequence
  Description of Artificial Sequence: Synthetic oligonucleotide
ctcagaccaccagcattccca

SEQ ID NO: 34245 - DNA, 21 bp, Artificial Sequence
  Description of Artificial Sequence: Synthetic oligonucleotide
ctcagaccaccagcaggactc

SEQ ID NO: 34246 - DNA, 21 bp, Artificial Sequence
  Description of Artificial Sequence: Synthetic oligonucleotide
ctcagaccaccacaaaacaac

SEQ ID NO: 34247 - DNA, 21 bp, Artificial Sequence
  Description of Artificial Sequence: Synthetic oligonucleotide
ctcagaccaagaccaagcgac

SEQ ID NO: 34248 - DNA, 21 bp, Artificial Sequence
  Description of Artificial Sequence: Synthetic oligonucleotide
ctcagaccaagcttcagccca

SEQ ID NO: 34249 - DNA, 21 bp, Artificial Sequence
  Description of Artificial Sequence: Synthetic oligonucleotide
ctcagaccaagcagcatcagc

SEQ ID NO: 34250 - DNA, 21 bp, Artificial Sequence
  Description of Artificial Sequence: Synthetic oligonucleotide
ctcagaccaagcagccaaaca

SEQ ID NO: 34251 - DNA, 21 bp, Artificial Sequence
  Description of Artificial Sequence: Synthetic oligonucleotide
ctcagaccaagcgtcagagaa

SEQ ID NO: 34252 - DNA, 21 bp, Artificial Sequence
  Description of Artificial Sequence: Synthetic oligonucleotide
ctcagaccaacaacaatgcca

SEQ ID NO: 34253 - DNA, 21 bp, Artificial Sequence
  Description of Artificial Sequence: Synthetic oligonucleotide
ctcagacaaggatacagccaa

SEQ ID NO: 34254 - DNA, 21 bp, Artificial Sequence
  Description of Artificial Sequence: Synthetic oligonucleotide
ctcagacaaagcacaccacca

SEQ ID NO: 34255 - DNA, 21 bp, Artificial Sequence
  Description of Artificial Sequence: Synthetic oligonucleotide
ctcagaagaccagaagaactc

SEQ ID NO: 34256 - DNA, 21 bp, Artificial Sequence
  Description of Artificial Sequence: Synthetic oligonucleotide
ctcagaagcgacacaaaatac

SEQ ID NO: 34257 - DNA, 21 bp, Artificial Sequence
  Description of Artificial Sequence: Synthetic oligonucleotide
ctcagaagcgacgtccaattc

SEQ ID NO: 34258 - DNA, 21 bp, Artificial Sequence
  Description of Artificial Sequence: Synthetic oligonucleotide
ctcagaagcgactgggtcgaa

SEQ ID NO: 34259 - DNA, 21 bp, Artificial Sequence
  Description of Artificial Sequence: Synthetic oligonucleotide
ctcagaagcgaaagctgcgca

SEQ ID NO: 34260 - DNA, 21 bp, Artificial Sequence
  Description of Artificial Sequence: Synthetic oligonucleotide
ctcagaagcggagcaatccaa

SEQ ID NO: 34261 - DNA, 21 bp, Artificial Sequence
  Description of Artificial Sequence: Synthetic oligonucleotide
ctcagaagcggaacactcgca

SEQ ID NO: 34262 - DNA, 21 bp, Artificial Sequence
  Description of Artificial Sequence: Synthetic oligonucleotide
ctcagaagcctcacagacgca

SEQ ID NO: 34263 - DNA, 21 bp, Artificial Sequence
  Description of Artificial Sequence: Synthetic oligonucleotide
ctcagaagcatgcaaacacca

SEQ ID NO: 34264 - DNA, 21 bp, Artificial Sequence
  Description of Artificial Sequence: Synthetic oligonucleotide
ctcagaagcccacacttcgac

SEQ ID NO: 34265 - DNA, 21 bp, Artificial Sequence
  Description of Artificial Sequence: Synthetic oligonucleotide
ctcagaagcccactcagccca

SEQ ID NO: 34266 - DNA, 21 bp, Artificial Sequence
  Description of Artificial Sequence: Synthetic oligonucleotide
ctcagaagcccaccaacagca

SEQ ID NO: 34267 - DNA, 21 bp, Artificial Sequence
  Description of Artificial Sequence: Synthetic oligonucleotide
ctcagaagccaagaaagacac

SEQ ID NO: 34268 - DNA, 21 bp, Artificial Sequence
  Description of Artificial Sequence: Synthetic oligonucleotide
ctcagaagccaaggaccactc

SEQ ID NO: 34269 - DNA, 21 bp, Artificial Sequence
  Description of Artificial Sequence: Synthetic oligonucleotide
ctcagaagcagcctcgactgg

SEQ ID NO: 34270 - DNA, 21 bp, Artificial Sequence
  Description of Artificial Sequence: Synthetic oligonucleotide
ctcagaagcagcagcccagga

SEQ ID NO: 34271 - DNA, 21 bp, Artificial Sequence
  Description of Artificial Sequence: Synthetic oligonucleotide
ctcagaagcagcacaacacca

SEQ ID NO: 34272 - DNA, 21 bp, Artificial Sequence
  Description of Artificial Sequence: Synthetic oligonucleotide
ctcagaagcacaagcgcatac

SEQ ID NO: 34273 - DNA, 21 bp, Artificial Sequence
  Description of Artificial Sequence: Synthetic oligonucleotide
ctcagaagcgtcaacgacagc

SEQ ID NO: 34274 - DNA, 21 bp, Artificial Sequence
  Description of Artificial Sequence: Synthetic oligonucleotide
ctcagaacagcagacgtcgca

SEQ ID NO: 34275 - DNA, 21 bp, Artificial Sequence
  Description of Artificial Sequence: Synthetic oligonucleotide
ctcagaacagcaagcccacca

SEQ ID NO: 34276 - DNA, 21 bp, Artificial Sequence
  Description of Artificial Sequence: Synthetic oligonucleotide
ctcagaacagcaagcagcaca

SEQ ID NO: 34277 - DNA, 21 bp, Artificial Sequence
  Description of Artificial Sequence: Synthetic oligonucleotide
ctcagaacagacatcctcagc

SEQ ID NO: 34278 - DNA, 21 bp, Artificial Sequence
  Description of Artificial Sequence: Synthetic oligonucleotide
ctcagaacaggatacctcgac

SEQ ID NO: 34279 - DNA, 21 bp, Artificial Sequence
  Description of Artificial Sequence: Synthetic oligonucleotide
ctcagaacactcaacgcagca

SEQ ID NO: 34280 - DNA, 21 bp, Artificial Sequence
  Description of Artificial Sequence: Synthetic oligonucleotide
ctcagaacaaacgacagccaa

SEQ ID NO: 34281 - DNA, 21 bp, Artificial Sequence
  Description of Artificial Sequence: Synthetic oligonucleotide
ctcagaacaccagaaagactc

SEQ ID NO: 34282 - DNA, 21 bp, Artificial Sequence
  Description of Artificial Sequence: Synthetic oligonucleotide
ctcagaacaccaaacggacca

SEQ ID NO: 34283 - DNA, 21 bp, Artificial Sequence
  Description of Artificial Sequence: Synthetic oligonucleotide
ctcagaacaagagaagcagga

SEQ ID NO: 34284 - DNA, 21 bp, Artificial Sequence
  Description of Artificial Sequence: Synthetic oligonucleotide
ctcagaacaagccaagacaga

SEQ ID NO: 34285 - DNA, 21 bp, Artificial Sequence
  Description of Artificial Sequence: Synthetic oligonucleotide
ctcagaacaacactcccactc

SEQ ID NO: 34286 - DNA, 21 bp, Artificial Sequence
  Description of Artificial Sequence: Synthetic oligonucleotide
ctcagaacagtcaacagcgca

SEQ ID NO: 34287 - DNA, 21 bp, Artificial Sequence
  Description of Artificial Sequence: Synthetic oligonucleotide
ctcagagtcgacctcctccaa

SEQ ID NO: 34288 - DNA, 21 bp, Artificial Sequence
  Description of Artificial Sequence: Synthetic oligonucleotide
ctcagagtcgacagcccagtc

SEQ ID NO: 34289 - DNA, 21 bp, Artificial Sequence
  Description of Artificial Sequence: Synthetic oligonucleotide
ctcagagtcgacgtcgcaaca

SEQ ID NO: 34290 - DNA, 21 bp, Artificial Sequence
  Description of Artificial Sequence: Synthetic oligonucleotide
ctcagagtcggaggaagctac

SEQ ID NO: 34291 - DNA, 21 bp, Artificial Sequence
  Description of Artificial Sequence: Synthetic oligonucleotide
ctcagagtcggaacagaacaa

SEQ ID NO: 34292 - DNA, 21 bp, Artificial Sequence
  Description of Artificial Sequence: Synthetic oligonucleotide
ctcagagtcctcgacgcaagc

SEQ ID NO: 34293 - DNA, 21 bp, Artificial Sequence
  Description of Artificial Sequence: Synthetic oligonucleotide
ctcagagtcaacccaatggtc

SEQ ID NO: 34294 - DNA, 21 bp, Artificial Sequence
  Description of Artificial Sequence: Synthetic oligonucleotide
ctcagagtcaacgtcgaagtc

SEQ ID NO: 34295 - DNA, 21 bp, Artificial Sequence
  Description of Artificial Sequence: Synthetic oligonucleotide
ctcagagtcccaccaatgagc

SEQ ID NO: 34296 - DNA, 21 bp, Artificial Sequence
  Description of Artificial Sequence: Synthetic oligonucleotide
ctcagagtcccaccaaacaac

SEQ ID NO: 34297 - DNA, 21 bp, Artificial Sequence
  Description of Artificial Sequence: Synthetic oligonucleotide
ctcagagtcacaagccaccca

SEQ ID NO: 34298 - DNA, 21 bp, Artificial Sequence
  Description of Artificial Sequence: Synthetic oligonucleotide
ctcagcgcagcaccaagcaac

SEQ ID NO: 34299 - DNA, 21 bp, Artificial Sequence
  Description of Artificial Sequence: Synthetic oligonucleotide
ctcagcgcagcaacaacaaaa

SEQ ID NO: 34300 - DNA, 21 bp, Artificial Sequence
  Description of Artificial Sequence: Synthetic oligonucleotide
ctcagcgcattcgtcaaagaa

SEQ ID NO: 34301 - DNA, 21 bp, Artificial Sequence
  Description of Artificial Sequence: Synthetic oligonucleotide
ctcagcgcaggagcaagagca

SEQ ID NO: 34302 - DNA, 21 bp, Artificial Sequence
  Description of Artificial Sequence: Synthetic oligonucleotide
ctcagcgcactcaacgtcaaa

SEQ ID NO: 34303 - DNA, 21 bp, Artificial Sequence
  Description of Artificial Sequence: Synthetic oligonucleotide
ctcagcgcacaaagaggagca

SEQ ID NO: 34304 - DNA, 21 bp, Artificial Sequence
  Description of Artificial Sequence: Synthetic oligonucleotide
ctcagcgcaagacacatgcca

SEQ ID NO: 34305 - DNA, 21 bp, Artificial Sequence
  Description of Artificial Sequence: Synthetic oligonucleotide
ctcagcgcaagaccagacctc

SEQ ID NO: 34306 - DNA, 21 bp, Artificial Sequence
  Description of Artificial Sequence: Synthetic oligonucleotide
ctcagcgcaagaccacacctc

SEQ ID NO: 34307 - DNA, 21 bp, Artificial Sequence
  Description of Artificial Sequence: Synthetic oligonucleotide
ctcagcgcaagcgcaaacagc

SEQ ID NO: 34308 - DNA, 21 bp, Artificial Sequence
  Description of Artificial Sequence: Synthetic oligonucleotide
ctcagcgcaagccacgtcgtc

SEQ ID NO: 34309 - DNA, 21 bp, Artificial Sequence
  Description of Artificial Sequence: Synthetic oligonucleotide
ctcagcgcaagctggacaagc

SEQ ID NO: 34310 - DNA, 21 bp, Artificial Sequence
  Description of Artificial Sequence: Synthetic oligonucleotide
ctcagcgcatacgcacaagga

SEQ ID NO: 34311 - DNA, 21 bp, Artificial Sequence
  Description of Artificial Sequence: Synthetic oligonucleotide
ctcagctgcggaagcatggaa

SEQ ID NO: 34312 - DNA, 21 bp, Artificial Sequence
  Description of Artificial Sequence: Synthetic oligonucleotide
ctcagcgacgcacacagctgg

SEQ ID NO: 34313 - DNA, 21 bp, Artificial Sequence
  Description of Artificial Sequence: Synthetic oligonucleotide
ctcagcgacgcagtcgcagaa

SEQ ID NO: 34314 - DNA, 21 bp, Artificial Sequence
  Description of Artificial Sequence: Synthetic oligonucleotide
ctcagcgacgaaagaacacac

SEQ ID NO: 34315 - DNA, 21 bp, Artificial Sequence
  Description of Artificial Sequence: Synthetic oligonucleotide
ctcagcgacttccaaaaccca

SEQ ID NO: 34316 - DNA, 21 bp, Artificial Sequence
  Description of Artificial Sequence: Synthetic oligonucleotide
ctcagcgaccaccacggactc

SEQ ID NO: 34317 - DNA, 21 bp, Artificial Sequence
  Description of Artificial Sequence: Synthetic oligonucleotide
ctcagcgacaaaggacaccca

SEQ ID NO: 34318 - DNA, 21 bp, Artificial Sequence
  Description of Artificial Sequence: Synthetic oligonucleotide
ctcagcgacctccaaggaaac

SEQ ID NO: 34319 - DNA, 21 bp, Artificial Sequence
  Description of Artificial Sequence: Synthetic oligonucleotide
ctcagcgacctcacaagctgg

SEQ ID NO: 34320 - DNA, 21 bp, Artificial Sequence
  Description of Artificial Sequence: Synthetic oligonucleotide
ctcagcgacccaacagaaatc

SEQ ID NO: 34321 - DNA, 21 bp, Artificial Sequence
  Description of Artificial Sequence: Synthetic oligonucleotide
ctcagcgacagaagcgtcctc

SEQ ID NO: 34322 - DNA, 21 bp, Artificial Sequence
  Description of Artificial Sequence: Synthetic oligonucleotide
ctcagcgaagcaccagtccac

SEQ ID NO: 34323 - DNA, 21 bp, Artificial Sequence
  Description of Artificial Sequence: Synthetic oligonucleotide
ctcagcgaattcagcagagca

SEQ ID NO: 34324 - DNA, 21 bp, Artificial Sequence
  Description of Artificial Sequence: Synthetic oligonucleotide
ctcagcgaaggatgcatcctc

SEQ ID NO: 34325 - DNA, 21 bp, Artificial Sequence
  Description of Artificial Sequence: Synthetic oligonucleotide
ctcagcgaaggactccaaaaa

SEQ ID NO: 34326 - DNA, 21 bp, Artificial Sequence
  Description of Artificial Sequence: Synthetic oligonucleotide
ctcagcgaaccaatgccattc

SEQ ID NO: 34327 - DNA, 21 bp, Artificial Sequence
  Description of Artificial Sequence: Synthetic oligonucleotide
ctcagcgaacaaacaagatac

SEQ ID NO: 34328 - DNA, 21 bp, Artificial Sequence
  Description of Artificial Sequence: Synthetic oligonucleotide
ctcagcgaaagaggagacatg

SEQ ID NO: 34329 - DNA, 21 bp, Artificial Sequence
  Description of Artificial Sequence: Synthetic oligonucleotide
ctcagcgaaagaccagtcctc

SEQ ID NO: 34330 - DNA, 21 bp, Artificial Sequence
  Description of Artificial Sequence: Synthetic oligonucleotide
ctcagcgaaagcaaccaagtc

SEQ ID NO: 34331 - DNA, 21 bp, Artificial Sequence
  Description of Artificial Sequence: Synthetic oligonucleotide
ctcagcgaaagctacgtcgtc

SEQ ID NO: 34332 - DNA, 21 bp, Artificial Sequence
  Description of Artificial Sequence: Synthetic oligonucleotide
ctcagcttcggaacaacaaca

SEQ ID NO: 34333 - DNA, 21 bp, Artificial Sequence
  Description of Artificial Sequence: Synthetic oligonucleotide
ctcagcttcaaaacacaactc

SEQ ID NO: 34334 - DNA, 21 bp, Artificial Sequence
  Description of Artificial Sequence: Synthetic oligonucleotide
ctcagcttcagcgcagaaagc

SEQ ID NO: 34335 - DNA, 21 bp, Artificial Sequence
  Description of Artificial Sequence: Synthetic oligonucleotide
ctcagcttcagcacaagcgga

SEQ ID NO: 34336 - DNA, 21 bp, Artificial Sequence
  Description of Artificial Sequence: Synthetic oligonucleotide
ctcagcggagcagcaggactc

SEQ ID NO: 34337 - DNA, 21 bp, Artificial Sequence
  Description of Artificial Sequence: Synthetic oligonucleotide
ctcagcggagcaatcccacca

SEQ ID NO: 34338 - DNA, 21 bp, Artificial Sequence
  Description of Artificial Sequence: Synthetic oligonucleotide
ctcagcggagcaaacagcgga

SEQ ID NO: 34339 - DNA, 21 bp, Artificial Sequence
  Description of Artificial Sequence: Synthetic oligonucleotide
ctcagcggagaacaagcactc

SEQ ID NO: 34340 - DNA, 21 bp, Artificial Sequence
  Description of Artificial Sequence: Synthetic oligonucleotide
ctcagcggaggagaaccacca

SEQ ID NO: 34341 - DNA, 21 bp, Artificial Sequence
  Description of Artificial Sequence: Synthetic oligonucleotide
ctcagcggaggacaaatcagc

SEQ ID NO: 34342 - DNA, 21 bp, Artificial Sequence
  Description of Artificial Sequence: Synthetic oligonucleotide
ctcagcggacaccacatcgtc

SEQ ID NO: 34343 - DNA, 21 bp, Artificial Sequence
  Description of Artificial Sequence: Synthetic oligonucleotide
ctcagcggaatcgcaggaatc

SEQ ID NO: 34344 - DNA, 21 bp, Artificial Sequence
  Description of Artificial Sequence: Synthetic oligonucleotide
ctcagcggaccaagcagcctc

SEQ ID NO: 34345 - DNA, 21 bp, Artificial Sequence
  Description of Artificial Sequence: Synthetic oligonucleotide
ctcagcggaacaccaggaatc

SEQ ID NO: 34346 - DNA, 21 bp, Artificial Sequence
  Description of Artificial Sequence: Synthetic oligonucleotide
ctcagcggagtcgcaatccaa

SEQ ID NO: 34347 - DNA, 21 bp, Artificial Sequence
  Description of Artificial Sequence: Synthetic oligonucleotide
ctcagccacgacgtcctcaca

SEQ ID NO: 34348 - DNA, 21 bp, Artificial Sequence
  Description of Artificial Sequence: Synthetic oligonucleotide
ctcagccacggaatgctcgga

SEQ ID NO: 34349 - DNA, 21 bp, Artificial Sequence
  Description of Artificial Sequence: Synthetic oligonucleotide
ctcagccacaaactcacagaa

SEQ ID NO: 34350 - DNA, 21 bp, Artificial Sequence
  Description of Artificial Sequence: Synthetic oligonucleotide
ctcagccacctcggattccca

SEQ ID NO: 34351 - DNA, 21 bp, Artificial Sequence
  Description of Artificial Sequence: Synthetic oligonucleotide
ctcagccacccaatgggatac

SEQ ID NO: 34352 - DNA, 21 bp, Artificial Sequence
  Description of Artificial Sequence: Synthetic oligonucleotide
ctcagccacagcatcccaaga

SEQ ID NO: 34353 - DNA, 21 bp, Artificial Sequence
  Description of Artificial Sequence: Synthetic oligonucleotide
ctcagccacacaacaaacgga

SEQ ID NO: 34354 - DNA, 21 bp, Artificial Sequence
  Description of Artificial Sequence: Synthetic oligonucleotide
ctcagccacgtcacaacagca

SEQ ID NO: 34355 - DNA, 21 bp, Artificial Sequence
  Description of Artificial Sequence: Synthetic oligonucleotide
ctcagcatcctcagcggaatc

SEQ ID NO: 34356 - DNA, 21 bp, Artificial Sequence
  Description of Artificial Sequence: Synthetic oligonucleotide
ctcagcatcccaagcggacca

SEQ ID NO: 34357 - DNA, 21 bp, Artificial Sequence
  Description of Artificial Sequence: Synthetic oligonucleotide
ctcagcaaagaaccattcatg

SEQ ID NO: 34358 - DNA, 21 bp, Artificial Sequence
  Description of Artificial Sequence: Synthetic oligonucleotide
ctcagcaaaggattcatggga

SEQ ID NO: 34359 - DNA, 21 bp, Artificial Sequence
  Description of Artificial Sequence: Synthetic oligonucleotide
ctcagcaaaggaaacgcagca

SEQ ID NO: 34360 - DNA, 21 bp, Artificial Sequence
  Description of Artificial Sequence: Synthetic oligonucleotide
ctcagcaaaacactcgaagaa

SEQ ID NO: 34361 - DNA, 21 bp, Artificial Sequence
  Description of Artificial Sequence: Synthetic oligonucleotide
ctcagcctcggagcaagcgca

SEQ ID NO: 34362 - DNA, 21 bp, Artificial Sequence
  Description of Artificial Sequence: Synthetic oligonucleotide
ctcagcctcggaccacacagc

SEQ ID NO: 34363 - DNA, 21 bp, Artificial Sequence
  Description of Artificial Sequence: Synthetic oligonucleotide
ctcagcctcggagtcgacagc

SEQ ID NO: 34364 - DNA, 21 bp, Artificial Sequence
  Description of Artificial Sequence: Synthetic oligonucleotide
ctcagcctccacccagcacca

SEQ ID NO: 34365 - DNA, 21 bp, Artificial Sequence
  Description of Artificial Sequence: Synthetic oligonucleotide
ctcagcctcaaacacctcaaa

SEQ ID NO: 34366 - DNA, 21 bp, Artificial Sequence
  Description of Artificial Sequence: Synthetic oligonucleotide
ctcagcctcccacaaagcatg

SEQ ID NO: 34367 - DNA, 21 bp, Artificial Sequence
  Description of Artificial Sequence: Synthetic oligonucleotide
ctcagcctcccaagaagcgac

SEQ ID NO: 34368 - DNA, 21 bp, Artificial Sequence
  Description of Artificial Sequence: Synthetic oligonucleotide
ctcagcctcccatacaacaga

SEQ ID NO: 34369 - DNA, 21 bp, Artificial Sequence
  Description of Artificial Sequence: Synthetic oligonucleotide
ctcagcctccaaacagtccca

SEQ ID NO: 34370 - DNA, 21 bp, Artificial Sequence
  Description of Artificial Sequence: Synthetic oligonucleotide
ctcagcctcagcaaaggaagc

SEQ ID NO: 34371 - DNA, 21 bp, Artificial Sequence
  Description of Artificial Sequence: Synthetic oligonucleotide
ctcagcctcagcccagtcgtc

SEQ ID NO: 34372 - DNA, 21 bp, Artificial Sequence
  Description of Artificial Sequence: Synthetic oligonucleotide
ctcagcctcgtcaaacacgac

SEQ ID NO: 34373 - DNA, 21 bp, Artificial Sequence
  Description of Artificial Sequence: Synthetic oligonucleotide
ctcagcatggcaagaacacca

SEQ ID NO: 34374 - DNA, 21 bp, Artificial Sequence
  Description of Artificial Sequence: Synthetic oligonucleotide
ctcagcatgaacccaaacgga

SEQ ID NO: 34375 - DNA, 21 bp, Artificial Sequence
  Description of Artificial Sequence: Synthetic oligonucleotide
ctcagcatgaacgtccaatac

SEQ ID NO: 34376 - DNA, 21 bp, Artificial Sequence
  Description of Artificial Sequence: Synthetic oligonucleotide
ctcagcatgcaaagaacagtc

SEQ ID NO: 34377 - DNA, 21 bp, Artificial Sequence
  Description of Artificial Sequence: Synthetic oligonucleotide
ctcagcatgagaagcgaaaca

SEQ ID NO: 34378 - DNA, 21 bp, Artificial Sequence
  Description of Artificial Sequence: Synthetic oligonucleotide
ctcagcatgagcaaaacacca

SEQ ID NO: 34379 - DNA, 21 bp, Artificial Sequence
  Description of Artificial Sequence: Synthetic oligonucleotide
ctcagcaacgaaggaagctac

SEQ ID NO: 34380 - DNA, 21 bp, Artificial Sequence
  Description of Artificial Sequence: Synthetic oligonucleotide
ctcagcaacggaagatacagc

SEQ ID NO: 34381 - DNA, 21 bp, Artificial Sequence
  Description of Artificial Sequence: Synthetic oligonucleotide
ctcagcaaccacccattcagc

SEQ ID NO: 34382 - DNA, 21 bp, Artificial Sequence
  Description of Artificial Sequence: Synthetic oligonucleotide
ctcagcaaccacgtcatcaca

SEQ ID NO: 34383 - DNA, 21 bp, Artificial Sequence
  Description of Artificial Sequence: Synthetic oligonucleotide
ctcagcaacatgcaacaaaaa

SEQ ID NO: 34384 - DNA, 21 bp, Artificial Sequence
  Description of Artificial Sequence: Synthetic oligonucleotide
ctcagcaacccagcaaaaaca

SEQ ID NO: 34385 - DNA, 21 bp, Artificial Sequence
  Description of Artificial Sequence: Synthetic oligonucleotide
ctcagcaacccaacaagaagc

SEQ ID NO: 34386 - DNA, 21 bp, Artificial Sequence
  Description of Artificial Sequence: Synthetic oligonucleotide
ctcagcaacagaaaaggagaa

SEQ ID NO: 34387 - DNA, 21 bp, Artificial Sequence
  Description of Artificial Sequence: Synthetic oligonucleotide
ctcagcaacagacaaatcaca

SEQ ID NO: 34388 - DNA, 21 bp, Artificial Sequence
  Description of Artificial Sequence: Synthetic oligonucleotide
ctcagcaacagcgcaatcctc

SEQ ID NO: 34389 - DNA, 21 bp, Artificial Sequence
  Description of Artificial Sequence: Synthetic oligonucleotide
ctcagcaacagcaaaggacca

SEQ ID NO: 34390 - DNA, 21 bp, Artificial Sequence
  Description of Artificial Sequence: Synthetic oligonucleotide
ctcagcaacagcagacacgac

SEQ ID NO: 34391 - DNA, 21 bp, Artificial Sequence
  Description of Artificial Sequence: Synthetic oligonucleotide
ctcagcaacagcagcagaatg

SEQ ID NO: 34392 - DNA, 21 bp, Artificial Sequence
  Description of Artificial Sequence: Synthetic oligonucleotide
ctcagcccagcagtcacaaga

SEQ ID NO: 34393 - DNA, 21 bp, Artificial Sequence
  Description of Artificial Sequence: Synthetic oligonucleotide
ctcagcccatgcccaagcaac

SEQ ID NO: 34394 - DNA, 21 bp, Artificial Sequence
  Description of Artificial Sequence: Synthetic oligonucleotide
ctcagcccattcagcgtcgtc

SEQ ID NO: 34395 - DNA, 21 bp, Artificial Sequence
  Description of Artificial Sequence: Synthetic oligonucleotide
ctcagcccaggaatcgcacaa

SEQ ID NO: 34396 - DNA, 21 bp, Artificial Sequence
  Description of Artificial Sequence: Synthetic oligonucleotide
ctcagcccacacagaacaagc

SEQ ID NO: 34397 - DNA, 21 bp, Artificial Sequence
  Description of Artificial Sequence: Synthetic oligonucleotide
ctcagcccaaaattcgtcctc

SEQ ID NO: 34398 - DNA, 21 bp, Artificial Sequence
  Description of Artificial Sequence: Synthetic oligonucleotide
ctcagcccaaacggaccaaac

SEQ ID NO: 34399 - DNA, 21 bp, Artificial Sequence
  Description of Artificial Sequence: Synthetic oligonucleotide
ctcagcccaccagacagactc

SEQ ID NO: 34400 - DNA, 21 bp, Artificial Sequence
  Description of Artificial Sequence: Synthetic oligonucleotide
ctcagcccaccaccagtcgac

SEQ ID NO: 34401 - DNA, 21 bp, Artificial Sequence
  Description of Artificial Sequence: Synthetic oligonucleotide
ctcagcccaccaacaccacac

SEQ ID NO: 34402 - DNA, 21 bp, Artificial Sequence
  Description of Artificial Sequence: Synthetic oligonucleotide
ctcagcccaagaacagtccac

SEQ ID NO: 34403 - DNA, 21 bp, Artificial Sequence
  Description of Artificial Sequence: Synthetic oligonucleotide
ctcagcccaagcttcacaagc

SEQ ID NO: 34404 - DNA, 21 bp, Artificial Sequence
  Description of Artificial Sequence: Synthetic oligonucleotide
ctcagcccaagcagcctcttc

SEQ ID NO: 34405 - DNA, 21 bp, Artificial Sequence
  Description of Artificial Sequence: Synthetic oligonucleotide
ctcagcccaagcagcctcgga

SEQ ID NO: 34406 - DNA, 21 bp, Artificial Sequence
  Description of Artificial Sequence: Synthetic oligonucleotide
ctcagcccaagcagcagagga

SEQ ID NO: 34407 - DNA, 21 bp, Artificial Sequence
  Description of Artificial Sequence: Synthetic oligonucleotide
ctcagcccaagcacagacttc

SEQ ID NO: 34408 - DNA, 21 bp, Artificial Sequence
  Description of Artificial Sequence: Synthetic oligonucleotide
ctcagcccaagcgtcacaaaa

SEQ ID NO: 34409 - DNA, 21 bp, Artificial Sequence
  Description of Artificial Sequence: Synthetic oligonucleotide
ctcagcccaacaagaacacaa

SEQ ID NO: 34410 - DNA, 21 bp, Artificial Sequence
  Description of Artificial Sequence: Synthetic oligonucleotide
ctcagcccaacagtcgcatac

SEQ ID NO: 34411 - DNA, 21 bp, Artificial Sequence
  Description of Artificial Sequence: Synthetic oligonucleotide
ctcagcccagtcccagtcgca

SEQ ID NO: 34412 - DNA, 21 bp, Artificial Sequence
  Description of Artificial Sequence: Synthetic oligonucleotide
ctcagcccagtccaagcagca

SEQ ID NO: 34413 - DNA, 21 bp, Artificial Sequence
  Description of Artificial Sequence: Synthetic oligonucleotide
ctcagccaagcaatccaaagc

SEQ ID NO: 34414 - DNA, 21 bp, Artificial Sequence
  Description of Artificial Sequence: Synthetic oligonucleotide
ctcagccaagcaaaaaacgtc

SEQ ID NO: 34415 - DNA, 21 bp, Artificial Sequence
  Description of Artificial Sequence: Synthetic oligonucleotide
ctcagccaagcactcctcgac

SEQ ID NO: 34416 - DNA, 21 bp, Artificial Sequence
  Description of Artificial Sequence: Synthetic oligonucleotide
ctcagccaagcaaacgaaaga

SEQ ID NO: 34417 - DNA, 21 bp, Artificial Sequence
  Description of Artificial Sequence: Synthetic oligonucleotide
ctcagccaagacctcacagtc

SEQ ID NO: 34418 - DNA, 21 bp, Artificial Sequence
  Description of Artificial Sequence: Synthetic oligonucleotide
ctcagccaaggaagcgcacca

SEQ ID NO: 34419 - DNA, 21 bp, Artificial Sequence
  Description of Artificial Sequence: Synthetic oligonucleotide
ctcagccaacacgcaagcaca

SEQ ID NO: 34420 - DNA, 21 bp, Artificial Sequence
  Description of Artificial Sequence: Synthetic oligonucleotide
ctcagccaacacatgagacca

SEQ ID NO: 34421 - DNA, 21 bp, Artificial Sequence
  Description of Artificial Sequence: Synthetic oligonucleotide
ctcagccaaaaaacaggaatc

SEQ ID NO: 34422 - DNA, 21 bp, Artificial Sequence
  Description of Artificial Sequence: Synthetic oligonucleotide
ctcagccaactcatccaagga

SEQ ID NO: 34423 - DNA, 21 bp, Artificial Sequence
  Description of Artificial Sequence: Synthetic oligonucleotide
ctcagccaactcacaccaagc

SEQ ID NO: 34424 - DNA, 21 bp, Artificial Sequence
  Description of Artificial Sequence: Synthetic oligonucleotide
ctcagccaactcacaagccaa

SEQ ID NO: 34425 - DNA, 21 bp, Artificial Sequence
  Description of Artificial Sequence: Synthetic oligonucleotide
ctcagccaactcgtcagcagc

SEQ ID NO: 34426 - DNA, 21 bp, Artificial Sequence
  Description of Artificial Sequence: Synthetic oligonucleotide
ctcagccaaccactcaacatg

SEQ ID NO: 34427 - DNA, 21 bp, Artificial Sequence
  Description of Artificial Sequence: Synthetic oligonucleotide
ctcagccaaagcttcgcaagc

SEQ ID NO: 34428 - DNA, 21 bp, Artificial Sequence
  Description of Artificial Sequence: Synthetic oligonucleotide
ctcagccaaacagcaagagca

SEQ ID NO: 34429 - DNA, 21 bp, Artificial Sequence
  Description of Artificial Sequence: Synthetic oligonucleotide
ctcagccaagtccacaaattc

SEQ ID NO: 34430 - DNA, 21 bp, Artificial Sequence
  Description of Artificial Sequence: Synthetic oligonucleotide
ctcagccaagtccaagcagga

SEQ ID NO: 34431 - DNA, 21 bp, Artificial Sequence
  Description of Artificial Sequence: Synthetic oligonucleotide
ctcagcagagacctcgaactc

SEQ ID NO: 34432 - DNA, 21 bp, Artificial Sequence
  Description of Artificial Sequence: Synthetic oligonucleotide
ctcagcagaggaccaacacca

SEQ ID NO: 34433 - DNA, 21 bp, Artificial Sequence
  Description of Artificial Sequence: Synthetic oligonucleotide
ctcagcagaggacaagtccca

SEQ ID NO: 34434 - DNA, 21 bp, Artificial Sequence
  Description of Artificial Sequence: Synthetic oligonucleotide
ctcagcagactcggaccaagc

SEQ ID NO: 34435 - DNA, 21 bp, Artificial Sequence
  Description of Artificial Sequence: Synthetic oligonucleotide
ctcagcagactcccaagcagc

SEQ ID NO: 34436 - DNA, 21 bp, Artificial Sequence
  Description of Artificial Sequence: Synthetic oligonucleotide
ctcagcagactcagcacagac

SEQ ID NO: 34437 - DNA, 21 bp, Artificial Sequence
  Description of Artificial Sequence: Synthetic oligonucleotide
ctcagcagaaacgtcacagaa

SEQ ID NO: 34438 - DNA, 21 bp, Artificial Sequence
  Description of Artificial Sequence: Synthetic oligonucleotide
ctcagcagacaaacaggatac

SEQ ID NO: 34439 - DNA, 21 bp, Artificial Sequence
  Description of Artificial Sequence: Synthetic oligonucleotide
ctcagcagaagcagcgcagca

SEQ ID NO: 34440 - DNA, 21 bp, Artificial Sequence
  Description of Artificial Sequence: Synthetic oligonucleotide
ctcagcagaagcgtcagcaca

SEQ ID NO: 34441 - DNA, 21 bp, Artificial Sequence
  Description of Artificial Sequence: Synthetic oligonucleotide
ctcagcagaacaacagcagac

SEQ ID NO: 34442 - DNA, 21 bp, Artificial Sequence
  Description of Artificial Sequence: Synthetic oligonucleotide
ctcagcagagtcgcagtcctc

SEQ ID NO: 34443 - DNA, 21 bp, Artificial Sequence
  Description of Artificial Sequence: Synthetic oligonucleotide
ctcagcagcgcaaacagcaca

SEQ ID NO: 34444 - DNA, 21 bp, Artificial Sequence
  Description of Artificial Sequence: Synthetic oligonucleotide
ctcagcagcgcacaaagagca

SEQ ID NO: 34445 - DNA, 21 bp, Artificial Sequence
  Description of Artificial Sequence: Synthetic oligonucleotide
ctcagcagcgacagcccagtc

SEQ ID NO: 34446 - DNA, 21 bp, Artificial Sequence
  Description of Artificial Sequence: Synthetic oligonucleotide
ctcagcagcgaatgcgcacca

SEQ ID NO: 34447 - DNA, 21 bp, Artificial Sequence
  Description of Artificial Sequence: Synthetic oligonucleotide
ctcagcagcggaatgagcaga

SEQ ID NO: 34448 - DNA, 21 bp, Artificial Sequence
  Description of Artificial Sequence: Synthetic oligonucleotide
ctcagcagcggaagaccacca

SEQ ID NO: 34449 - DNA, 21 bp, Artificial Sequence
  Description of Artificial Sequence: Synthetic oligonucleotide
ctcagcagccacagcacaagc

SEQ ID NO: 34450 - DNA, 21 bp, Artificial Sequence
  Description of Artificial Sequence: Synthetic oligonucleotide
ctcagcagcatccaaacatac

SEQ ID NO: 34451 - DNA, 21 bp, Artificial Sequence
  Description of Artificial Sequence: Synthetic oligonucleotide
ctcagcagcatcagccacaac

SEQ ID NO: 34452 - DNA, 21 bp, Artificial Sequence
  Description of Artificial Sequence: Synthetic oligonucleotide
ctcagcagcaaaccatacgca

SEQ ID NO: 34453 - DNA, 21 bp, Artificial Sequence
  Description of Artificial Sequence: Synthetic oligonucleotide
ctcagcagcctcgcaatggtc

SEQ ID NO: 34454 - DNA, 21 bp, Artificial Sequence
  Description of Artificial Sequence: Synthetic oligonucleotide
ctcagcagcctcaaaggaaac

SEQ ID NO: 34455 - DNA, 21 bp, Artificial Sequence
  Description of Artificial Sequence: Synthetic oligonucleotide
ctcagcagcctcaaactcgca

SEQ ID NO: 34456 - DNA, 21 bp, Artificial Sequence
  Description of Artificial Sequence: Synthetic oligonucleotide
ctcagcagcctcatgcacagc

SEQ ID NO: 34457 - DNA, 21 bp, Artificial Sequence
  Description of Artificial Sequence: Synthetic oligonucleotide
ctcagcagcctcaacccaagc

SEQ ID NO: 34458 - DNA, 21 bp, Artificial Sequence
  Description of Artificial Sequence: Synthetic oligonucleotide
ctcagcagcctcccaaaaatc

SEQ ID NO: 34459 - DNA, 21 bp, Artificial Sequence
  Description of Artificial Sequence: Synthetic oligonucleotide
ctcagcagcatgagaagcaca

SEQ ID NO: 34460 - DNA, 21 bp, Artificial Sequence
  Description of Artificial Sequence: Synthetic oligonucleotide
ctcagcagcatgacaaacgac

SEQ ID NO: 34461 - DNA, 21 bp, Artificial Sequence
  Description of Artificial Sequence: Synthetic oligonucleotide
ctcagcagcaacagcctcgac

SEQ ID NO: 34462 - DNA, 21 bp, Artificial Sequence
  Description of Artificial Sequence: Synthetic oligonucleotide
ctcagcagcccagcaggaagc

SEQ ID NO: 34463 - DNA, 21 bp, Artificial Sequence
  Description of Artificial Sequence: Synthetic oligonucleotide
ctcagcagcccaggaagcatg

SEQ ID NO: 34464 - DNA, 21 bp, Artificial Sequence
  Description of Artificial Sequence: Synthetic oligonucleotide
ctcagcagcccaatggacagc

SEQ ID NO: 34465 - DNA, 21 bp, Artificial Sequence
  Description of Artificial Sequence: Synthetic oligonucleotide
ctcagcagccaatgcatcaac

SEQ ID NO: 34466 - DNA, 21 bp, Artificial Sequence
  Description of Artificial Sequence: Synthetic oligonucleotide
ctcagcagccaacacacaagc

SEQ ID NO: 34467 - DNA, 21 bp, Artificial Sequence
  Description of Artificial Sequence: Synthetic oligonucleotide
ctcagcagccaaccaaaattc

SEQ ID NO: 34468 - DNA, 21 bp, Artificial Sequence
  Description of Artificial Sequence: Synthetic oligonucleotide
ctcagcagcagaagcacaaca

SEQ ID NO: 34469 - DNA, 21 bp, Artificial Sequence
  Description of Artificial Sequence: Synthetic oligonucleotide
ctcagcagcagctgcgaaaga

SEQ ID NO: 34470 - DNA, 21 bp, Artificial Sequence
  Description of Artificial Sequence: Synthetic oligonucleotide
ctcagcagcagcctcgaatac

SEQ ID NO: 34471 - DNA, 21 bp, Artificial Sequence
  Description of Artificial Sequence: Synthetic oligonucleotide
ctcagcagcagcagaccaagc

SEQ ID NO: 34472 - DNA, 21 bp, Artificial Sequence
  Description of Artificial Sequence: Synthetic oligonucleotide
ctcagcagcagcgtcgtcttc

SEQ ID NO: 34473 - DNA, 21 bp, Artificial Sequence
  Description of Artificial Sequence: Synthetic oligonucleotide
ctcagcagcacaagcaaagca

SEQ ID NO: 34474 - DNA, 21 bp, Artificial Sequence
  Description of Artificial Sequence: Synthetic oligonucleotide
ctcagcagcgtcgcaacacca

SEQ ID NO: 34475 - DNA, 21 bp, Artificial Sequence
  Description of Artificial Sequence: Synthetic oligonucleotide
ctcagcagcgtcttcagaaca

SEQ ID NO: 34476 - DNA, 21 bp, Artificial Sequence
  Description of Artificial Sequence: Synthetic oligonucleotide
ctcagcagcgtccacgcagtc

SEQ ID NO: 34477 - DNA, 21 bp, Artificial Sequence
  Description of Artificial Sequence: Synthetic oligonucleotide
ctcagcagcgtcagactcagc

SEQ ID NO: 34478 - DNA, 21 bp, Artificial Sequence
  Description of Artificial Sequence: Synthetic oligonucleotide
ctcagcacagcagtcacaaga

SEQ ID NO: 34479 - DNA, 21 bp, Artificial Sequence
  Description of Artificial Sequence: Synthetic oligonucleotide
ctcagcacagaagacctcctc

SEQ ID NO: 34480 - DNA, 21 bp, Artificial Sequence
  Description of Artificial Sequence: Synthetic oligonucleotide
ctcagcacattcccagtcgca

SEQ ID NO: 34481 - DNA, 21 bp, Artificial Sequence
  Description of Artificial Sequence: Synthetic oligonucleotide
ctcagcacattccaaggagga

SEQ ID NO: 34482 - DNA, 21 bp, Artificial Sequence
  Description of Artificial Sequence: Synthetic oligonucleotide
ctcagcacaggaagcagacaa

SEQ ID NO: 34483 - DNA, 21 bp, Artificial Sequence
  Description of Artificial Sequence: Synthetic oligonucleotide
ctcagcacaggaacaatggac

SEQ ID NO: 34484 - DNA, 21 bp, Artificial Sequence
  Description of Artificial Sequence: Synthetic oligonucleotide
ctcagcacaatccacccaagc

SEQ ID NO: 34485 - DNA, 21 bp, Artificial Sequence
  Description of Artificial Sequence: Synthetic oligonucleotide
ctcagcacaaaaggaacaatg

SEQ ID NO: 34486 - DNA, 21 bp, Artificial Sequence
  Description of Artificial Sequence: Synthetic oligonucleotide
ctcagcacactcgaaaacgaa

SEQ ID NO: 34487 - DNA, 21 bp, Artificial Sequence
  Description of Artificial Sequence: Synthetic oligonucleotide
ctcagcacactcctcacagca

SEQ ID NO: 34488 - DNA, 21 bp, Artificial Sequence
  Description of Artificial Sequence: Synthetic oligonucleotide
ctcagcacactcccaaaagac

SEQ ID NO: 34489 - DNA, 21 bp, Artificial Sequence
  Description of Artificial Sequence: Synthetic oligonucleotide
ctcagcacaatgagcagcctc

SEQ ID NO: 34490 - DNA, 21 bp, Artificial Sequence
  Description of Artificial Sequence: Synthetic oligonucleotide
ctcagcacaatgacagcatac

SEQ ID NO: 34491 - DNA, 21 bp, Artificial Sequence
  Description of Artificial Sequence: Synthetic oligonucleotide
ctcagcacaaacatgccacca

SEQ ID NO: 34492 - DNA, 21 bp, Artificial Sequence
  Description of Artificial Sequence: Synthetic oligonucleotide
ctcagcacaccacacctcaca

SEQ ID NO: 34493 - DNA, 21 bp, Artificial Sequence
  Description of Artificial Sequence: Synthetic oligonucleotide
ctcagcacaccacacatggca

SEQ ID NO: 34494 - DNA, 21 bp, Artificial Sequence
  Description of Artificial Sequence: Synthetic oligonucleotide
ctcagcacaccaagccaacca

SEQ ID NO: 34495 - DNA, 21 bp, Artificial Sequence
  Description of Artificial Sequence: Synthetic oligonucleotide
ctcagcacaagaagcctccca

SEQ ID NO: 34496 - DNA, 21 bp, Artificial Sequence
  Description of Artificial Sequence: Synthetic oligonucleotide
ctcagcacaagaagcccactc

SEQ ID NO: 34497 - DNA, 21 bp, Artificial Sequence
  Description of Artificial Sequence: Synthetic oligonucleotide
ctcagcacaagccacagcgtc

SEQ ID NO: 34498 - DNA, 21 bp, Artificial Sequence
  Description of Artificial Sequence: Synthetic oligonucleotide
ctcagcacagtcagaatggtc

SEQ ID NO: 34499 - DNA, 21 bp, Artificial Sequence
  Description of Artificial Sequence: Synthetic oligonucleotide
ctcagcgtcgacgaaatggtc

SEQ ID NO: 34500 - DNA, 21 bp, Artificial Sequence
  Description of Artificial Sequence: Synthetic oligonucleotide
ctcagcgtcggaagaacagaa

SEQ ID NO: 34501 - DNA, 21 bp, Artificial Sequence
  Description of Artificial Sequence: Synthetic oligonucleotide
ctcagcgtccacggactcaaa

SEQ ID NO: 34502 - DNA, 21 bp, Artificial Sequence
  Description of Artificial Sequence: Synthetic oligonucleotide
ctcagcgtcaacagcagcctc

SEQ ID NO: 34503 - DNA, 21 bp, Artificial Sequence
  Description of Artificial Sequence: Synthetic oligonucleotide
ctcagcgtcccaatgccagac

SEQ ID NO: 34504 - DNA, 21 bp, Artificial Sequence
  Description of Artificial Sequence: Synthetic oligonucleotide
ctcagcgtcccaagagcacca

SEQ ID NO: 34505 - DNA, 21 bp, Artificial Sequence
  Description of Artificial Sequence: Synthetic oligonucleotide
ctcagcgtcagaggacacatc

SEQ ID NO: 34506 - DNA, 21 bp, Artificial Sequence
  Description of Artificial Sequence: Synthetic oligonucleotide
ctcagcgtcagaagcatcgga

SEQ ID NO: 34507 - DNA, 21 bp, Artificial Sequence
  Description of Artificial Sequence: Synthetic oligonucleotide
ctcagcgtcagcctcacagca

SEQ ID NO: 34508 - DNA, 21 bp, Artificial Sequence
  Description of Artificial Sequence: Synthetic oligonucleotide
ctcagcgtcagcccactcagc

SEQ ID NO: 34509 - DNA, 21 bp, Artificial Sequence
  Description of Artificial Sequence: Synthetic oligonucleotide
ctcagcgtctacacagcagac

SEQ ID NO: 34510 - DNA, 21 bp, Artificial Sequence
  Description of Artificial Sequence: Synthetic oligonucleotide
ctcagctacggaagaccagtc

SEQ ID NO: 34511 - DNA, 21 bp, Artificial Sequence
  Description of Artificial Sequence: Synthetic oligonucleotide
ctcagctacccaagaaacgac

SEQ ID NO: 34512 - DNA, 21 bp, Artificial Sequence
  Description of Artificial Sequence: Synthetic oligonucleotide
ctcacagcaccaagacaagca

SEQ ID NO: 34513 - DNA, 21 bp, Artificial Sequence
  Description of Artificial Sequence: Synthetic oligonucleotide
ctcacagcaccaacaagccaa

SEQ ID NO: 34514 - DNA, 21 bp, Artificial Sequence
  Description of Artificial Sequence: Synthetic oligonucleotide
ctcacagcaagcatcggaaac

SEQ ID NO: 34515 - DNA, 21 bp, Artificial Sequence
  Description of Artificial Sequence: Synthetic oligonucleotide
ctcacagcaagcatcaaagca

SEQ ID NO: 34516 - DNA, 21 bp, Artificial Sequence
  Description of Artificial Sequence: Synthetic oligonucleotide
ctcacagcagtcccactcagc

SEQ ID NO: 34517 - DNA, 21 bp, Artificial Sequence
  Description of Artificial Sequence: Synthetic oligonucleotide
ctcacagacgaaaacgtctgc

SEQ ID NO: 34518 - DNA, 21 bp, Artificial Sequence
  Description of Artificial Sequence: Synthetic oligonucleotide
ctcacagacatcacaaacaga

SEQ ID NO: 34519 - DNA, 21 bp, Artificial Sequence
  Description of Artificial Sequence: Synthetic oligonucleotide
ctcacagacctcgaccaaatg

SEQ ID NO: 34520 - DNA, 21 bp, Artificial Sequence
  Description of Artificial Sequence: Synthetic oligonucleotide
ctcacagacctcagactcgtc

SEQ ID NO: 34521 - DNA, 21 bp, Artificial Sequence
  Description of Artificial Sequence: Synthetic oligonucleotide
ctcacagacctcagcgcaagc

SEQ ID NO: 34522 - DNA, 21 bp, Artificial Sequence
  Description of Artificial Sequence: Synthetic oligonucleotide
ctcacagacagcctcagaaca

SEQ ID NO: 34523 - DNA, 21 bp, Artificial Sequence
  Description of Artificial Sequence: Synthetic oligonucleotide
ctcacagacacaagagtcaca

SEQ ID NO: 34524 - DNA, 21 bp, Artificial Sequence
  Description of Artificial Sequence: Synthetic oligonucleotide
ctcacagaaatgagaccagga

SEQ ID NO: 34525 - DNA, 21 bp, Artificial Sequence
  Description of Artificial Sequence: Synthetic oligonucleotide
ctcacagaaacaagagcagga

SEQ ID NO: 34526 - DNA, 21 bp, Artificial Sequence
  Description of Artificial Sequence: Synthetic oligonucleotide
ctcacagaagtcagaacatac

SEQ ID NO: 34527 - DNA, 21 bp, Artificial Sequence
  Description of Artificial Sequence: Synthetic oligonucleotide
ctcacagaatggagcaaagaa

SEQ ID NO: 34528 - DNA, 21 bp, Artificial Sequence
  Description of Artificial Sequence: Synthetic oligonucleotide
ctcacattcggagcaacaagc

SEQ ID NO: 34529 - DNA, 21 bp, Artificial Sequence
  Description of Artificial Sequence: Synthetic oligonucleotide
ctcacattcagcgcaggactc

SEQ ID NO: 34530 - DNA, 21 bp, Artificial Sequence
  Description of Artificial Sequence: Synthetic oligonucleotide
ctcacaggagcattcaaaagc

SEQ ID NO: 34531 - DNA, 21 bp, Artificial Sequence
  Description of Artificial Sequence: Synthetic oligonucleotide
ctcacaggagaattcagagac

SEQ ID NO: 34532 - DNA, 21 bp, Artificial Sequence
  Description of Artificial Sequence: Synthetic oligonucleotide
ctcacaggattcagcaaccaa

SEQ ID NO: 34533 - DNA, 21 bp, Artificial Sequence
  Description of Artificial Sequence: Synthetic oligonucleotide
ctcacaggaggactctacgga

SEQ ID NO: 34534 - DNA, 21 bp, Artificial Sequence
  Description of Artificial Sequence: Synthetic oligonucleotide
ctcacaggaggacaagtcgca

SEQ ID NO: 34535 - DNA, 21 bp, Artificial Sequence
  Description of Artificial Sequence: Synthetic oligonucleotide
ctcacaggaatgatcaaatac

SEQ ID NO: 34536 - DNA, 21 bp, Artificial Sequence
  Description of Artificial Sequence: Synthetic oligonucleotide
ctcacaggaaacagaccagca

SEQ ID NO: 34537 - DNA, 21 bp, Artificial Sequence
  Description of Artificial Sequence: Synthetic oligonucleotide
ctcacaggaccatgcacaagc

SEQ ID NO: 34538 - DNA, 21 bp, Artificial Sequence
  Description of Artificial Sequence: Synthetic oligonucleotide
ctcacaggacaaatcagagtc

SEQ ID NO: 34539 - DNA, 21 bp, Artificial Sequence
  Description of Artificial Sequence: Synthetic oligonucleotide
ctcacaggaagaggaggaagc

SEQ ID NO: 34540 - DNA, 21 bp, Artificial Sequence
  Description of Artificial Sequence: Synthetic oligonucleotide
ctcacaggaagcagccacgtc

SEQ ID NO: 34541 - DNA, 21 bp, Artificial Sequence
  Description of Artificial Sequence: Synthetic oligonucleotide
ctcacaggaacactcagaatg

SEQ ID NO: 34542 - DNA, 21 bp, Artificial Sequence
  Description of Artificial Sequence: Synthetic oligonucleotide
ctcacacacgcagtcccaaca

SEQ ID NO: 34543 - DNA, 21 bp, Artificial Sequence
  Description of Artificial Sequence: Synthetic oligonucleotide
ctcacacacaaactcgacgca

SEQ ID NO: 34544 - DNA, 21 bp, Artificial Sequence
  Description of Artificial Sequence: Synthetic oligonucleotide
ctcacacacccagcagtccac

SEQ ID NO: 34545 - DNA, 21 bp, Artificial Sequence
  Description of Artificial Sequence: Synthetic oligonucleotide
ctcacacacgtcccaacagca

SEQ ID NO: 34546 - DNA, 21 bp, Artificial Sequence
  Description of Artificial Sequence: Synthetic oligonucleotide
ctcacaatcggacacgtccca

SEQ ID NO: 34547 - DNA, 21 bp, Artificial Sequence
  Description of Artificial Sequence: Synthetic oligonucleotide
ctcacaatcccaagcgcacaa

SEQ ID NO: 34548 - DNA, 21 bp, Artificial Sequence
  Description of Artificial Sequence: Synthetic oligonucleotide
ctcacaaaaggaagcgtccaa

SEQ ID NO: 34549 - DNA, 21 bp, Artificial Sequence
  Description of Artificial Sequence: Synthetic oligonucleotide
ctcacaaaaagcagccacgca

SEQ ID NO: 34550 - DNA, 21 bp, Artificial Sequence
  Description of Artificial Sequence: Synthetic oligonucleotide
ctcacaaaaacagtcggaagc

SEQ ID NO: 34551 - DNA, 21 bp, Artificial Sequence
  Description of Artificial Sequence: Synthetic oligonucleotide
ctcacactcgcaatcggagca

SEQ ID NO: 34552 - DNA, 21 bp, Artificial Sequence
  Description of Artificial Sequence: Synthetic oligonucleotide
ctcacactcggaccaagaagc

SEQ ID NO: 34553 - DNA, 21 bp, Artificial Sequence
  Description of Artificial Sequence: Synthetic oligonucleotide
ctcacactccaaaaaggaaca

SEQ ID NO: 34554 - DNA, 21 bp, Artificial Sequence
  Description of Artificial Sequence: Synthetic oligonucleotide
ctcacactccaaccaatcgca

SEQ ID NO: 34555 - DNA, 21 bp, Artificial Sequence
  Description of Artificial Sequence: Synthetic oligonucleotide
ctcacactcacaggaagcagc

SEQ ID NO: 34556 - DNA, 21 bp, Artificial Sequence
  Description of Artificial Sequence: Synthetic oligonucleotide
ctcacactcacaagcgcacac

SEQ ID NO: 34557 - DNA, 21 bp, Artificial Sequence
  Description of Artificial Sequence: Synthetic oligonucleotide
ctcacactcgtccacgcagaa

SEQ ID NO: 34558 - DNA, 21 bp, Artificial Sequence
  Description of Artificial Sequence: Synthetic oligonucleotide
ctcacaatgggaagcgcaagc

SEQ ID NO: 34559 - DNA, 21 bp, Artificial Sequence
  Description of Artificial Sequence: Synthetic oligonucleotide
ctcacaatgatccaaagagac

SEQ ID NO: 34560 - DNA, 21 bp, Artificial Sequence
  Description of Artificial Sequence: Synthetic oligonucleotide
ctcacaatgagaccaccaagc

SEQ ID NO: 34561 - DNA, 21 bp, Artificial Sequence
  Description of Artificial Sequence: Synthetic oligonucleotide
ctcacaatgagcagagcactc

SEQ ID NO: 34562 - DNA, 21 bp, Artificial Sequence
  Description of Artificial Sequence: Synthetic oligonucleotide
ctcacaaacgcacaccacctc

SEQ ID NO: 34563 - DNA, 21 bp, Artificial Sequence
  Description of Artificial Sequence: Synthetic oligonucleotide
ctcacaaacgcaagaccagca

SEQ ID NO: 34564 - DNA, 21 bp, Artificial Sequence
  Description of Artificial Sequence: Synthetic oligonucleotide
ctcacaaacgaagcacacaga

SEQ ID NO: 34565 - DNA, 21 bp, Artificial Sequence
  Description of Artificial Sequence: Synthetic oligonucleotide
ctcacaaacaaaccaatctgc

SEQ ID NO: 34566 - DNA, 21 bp, Artificial Sequence
  Description of Artificial Sequence: Synthetic oligonucleotide
ctcacaaacatgagaacaaca

SEQ ID NO: 34567 - DNA, 21 bp, Artificial Sequence
  Description of Artificial Sequence: Synthetic oligonucleotide
ctcacaaacaacgaacaagtc

SEQ ID NO: 34568 - DNA, 21 bp, Artificial Sequence
  Description of Artificial Sequence: Synthetic oligonucleotide
ctcacaaacagacaaaaccaa

SEQ ID NO: 34569 - DNA, 21 bp, Artificial Sequence
  Description of Artificial Sequence: Synthetic oligonucleotide
ctcacaccagcactcggacca

SEQ ID NO: 34570 - DNA, 21 bp, Artificial Sequence
  Description of Artificial Sequence: Synthetic oligonucleotide
ctcacaccagcaagaacatac

SEQ ID NO: 34571 - DNA, 21 bp, Artificial Sequence
  Description of Artificial Sequence: Synthetic oligonucleotide
ctcacaccaggaagaggagtc

SEQ ID NO: 34572 - DNA, 21 bp, Artificial Sequence
  Description of Artificial Sequence: Synthetic oligonucleotide
ctcacaccacacgtcatggac

SEQ ID NO: 34573 - DNA, 21 bp, Artificial Sequence
  Description of Artificial Sequence: Synthetic oligonucleotide
ctcacaccaatcaacagcgca

SEQ ID NO: 34574 - DNA, 21 bp, Artificial Sequence
  Description of Artificial Sequence: Synthetic oligonucleotide
ctcacaccaaaaagcatcagc

SEQ ID NO: 34575 - DNA, 21 bp, Artificial Sequence
  Description of Artificial Sequence: Synthetic oligonucleotide
ctcacaccactcctcggaagc

SEQ ID NO: 34576 - DNA, 21 bp, Artificial Sequence
  Description of Artificial Sequence: Synthetic oligonucleotide
ctcacaccactcatgagcgac

SEQ ID NO: 34577 - DNA, 21 bp, Artificial Sequence
  Description of Artificial Sequence: Synthetic oligonucleotide
ctcacaccaagactcccagca

SEQ ID NO: 34578 - DNA, 21 bp, Artificial Sequence
  Description of Artificial Sequence: Synthetic oligonucleotide
ctcacaccaagcggacactgg

SEQ ID NO: 34579 - DNA, 21 bp, Artificial Sequence
  Description of Artificial Sequence: Synthetic oligonucleotide
ctcacaccaagcggatacaac

SEQ ID NO: 34580 - DNA, 21 bp, Artificial Sequence
  Description of Artificial Sequence: Synthetic oligonucleotide
ctcacaccaagccaaccatac

SEQ ID NO: 34581 - DNA, 21 bp, Artificial Sequence
  Description of Artificial Sequence: Synthetic oligonucleotide
ctcacaccaagcgtcaaagga

SEQ ID NO: 34582 - DNA, 21 bp, Artificial Sequence
  Description of Artificial Sequence: Synthetic oligonucleotide
ctcacaccaagcgtcccacac

SEQ ID NO: 34583 - DNA, 21 bp, Artificial Sequence
  Description of Artificial Sequence: Synthetic oligonucleotide
ctcacaccaacaaaaatggaa

SEQ ID NO: 34584 - DNA, 21 bp, Artificial Sequence
  Description of Artificial Sequence: Synthetic oligonucleotide
ctcacaccagtcagcccagac

SEQ ID NO: 34585 - DNA, 21 bp, Artificial Sequence
  Description of Artificial Sequence: Synthetic oligonucleotide
ctcacacaaaaaacaccatac

SEQ ID NO: 34586 - DNA, 21 bp, Artificial Sequence
  Description of Artificial Sequence: Synthetic oligonucleotide
ctcacacaactcagagtcaca

SEQ ID NO: 34587 - DNA, 21 bp, Artificial Sequence
  Description of Artificial Sequence: Synthetic oligonucleotide
ctcacacaaagccacccagca

SEQ ID NO: 34588 - DNA, 21 bp, Artificial Sequence
  Description of Artificial Sequence: Synthetic oligonucleotide
ctcacaagaaaagaaacagac

SEQ ID NO: 34589 - DNA, 21 bp, Artificial Sequence
  Description of Artificial Sequence: Synthetic oligonucleotide
ctcacaagaccagacgacaca

SEQ ID NO: 34590 - DNA, 21 bp, Artificial Sequence
  Description of Artificial Sequence: Synthetic oligonucleotide
ctcacaagacaacacagcgac

SEQ ID NO: 34591 - DNA, 21 bp, Artificial Sequence
  Description of Artificial Sequence: Synthetic oligonucleotide
ctcacaagaagcccaccagca

SEQ ID NO: 34592 - DNA, 21 bp, Artificial Sequence
  Description of Artificial Sequence: Synthetic oligonucleotide
ctcacaagcgcaccaggaaga

SEQ ID NO: 34593 - DNA, 21 bp, Artificial Sequence
  Description of Artificial Sequence: Synthetic oligonucleotide
ctcacaagcggaaaaagccaa

SEQ ID NO: 34594 - DNA, 21 bp, Artificial Sequence
  Description of Artificial Sequence: Synthetic oligonucleotide
ctcacaagcggaccactcaga

SEQ ID NO: 34595 - DNA, 21 bp, Artificial Sequence
  Description of Artificial Sequence: Synthetic oligonucleotide
ctcacaagccacgcacaatac

SEQ ID NO: 34596 - DNA, 21 bp, Artificial Sequence
  Description of Artificial Sequence: Synthetic oligonucleotide
ctcacaagcaaacacctccca

SEQ ID NO: 34597 - DNA, 21 bp, Artificial Sequence
  Description of Artificial Sequence: Synthetic oligonucleotide
ctcacaagcaaacaaggaagc

SEQ ID NO: 34598 - DNA, 21 bp, Artificial Sequence
  Description of Artificial Sequence: Synthetic oligonucleotide
ctcacaagcctcaaaagcgca

SEQ ID NO: 34599 - DNA, 21 bp, Artificial Sequence
  Description of Artificial Sequence: Synthetic oligonucleotide
ctcacaagcctcagaacagaa

SEQ ID NO: 34600 - DNA, 21 bp, Artificial Sequence
  Description of Artificial Sequence: Synthetic oligonucleotide
ctcacaagcctctacggagtc

SEQ ID NO: 34601 - DNA, 21 bp, Artificial Sequence
  Description of Artificial Sequence: Synthetic oligonucleotide
ctcacaagcaacgaaatgagc

SEQ ID NO: 34602 - DNA, 21 bp, Artificial Sequence
  Description of Artificial Sequence: Synthetic oligonucleotide
ctcacaagcaacagagcactc

SEQ ID NO: 34603 - DNA, 21 bp, Artificial Sequence
  Description of Artificial Sequence: Synthetic oligonucleotide
ctcacaagcagaacagtccca

SEQ ID NO: 34604 - DNA, 21 bp, Artificial Sequence
  Description of Artificial Sequence: Synthetic oligonucleotide
ctcacaagcacagcacaaagc

SEQ ID NO: 34605 - DNA, 21 bp, Artificial Sequence
  Description of Artificial Sequence: Synthetic oligonucleotide
ctcacaagcacaaacggaatg

SEQ ID NO: 34606 - DNA, 21 bp, Artificial Sequence
  Description of Artificial Sequence: Synthetic oligonucleotide
ctcacaagcacaagactcagc

SEQ ID NO: 34607 - DNA, 21 bp, Artificial Sequence
  Description of Artificial Sequence: Synthetic oligonucleotide
ctcacaacagcaagaccactc

SEQ ID NO: 34608 - DNA, 21 bp, Artificial Sequence
  Description of Artificial Sequence: Synthetic oligonucleotide
ctcacaacaggagcatacgga

SEQ ID NO: 34609 - DNA, 21 bp, Artificial Sequence
  Description of Artificial Sequence: Synthetic oligonucleotide
ctcacaacaatcagagacgtc

SEQ ID NO: 34610 - DNA, 21 bp, Artificial Sequence
  Description of Artificial Sequence: Synthetic oligonucleotide
ctcacaacaaaagcagcaaac

SEQ ID NO: 34611 - DNA, 21 bp, Artificial Sequence
  Description of Artificial Sequence: Synthetic oligonucleotide
ctcacaacaaaaaacatggca

SEQ ID NO: 34612 - DNA, 21 bp, Artificial Sequence
  Description of Artificial Sequence: Synthetic oligonucleotide
ctcacaacaaaaagactcgac

SEQ ID NO: 34613 - DNA, 21 bp, Artificial Sequence
  Description of Artificial Sequence: Synthetic oligonucleotide
ctcacaacaaaaagccaagac

SEQ ID NO: 34614 - DNA, 21 bp, Artificial Sequence
  Description of Artificial Sequence: Synthetic oligonucleotide
ctcacaacactccacagcaaa

SEQ ID NO: 34615 - DNA, 21 bp, Artificial Sequence
  Description of Artificial Sequence: Synthetic oligonucleotide
ctcacaacaatgaacgcattc

SEQ ID NO: 34616 - DNA, 21 bp, Artificial Sequence
  Description of Artificial Sequence: Synthetic oligonucleotide
ctcacaacaatgagaagcaac

SEQ ID NO: 34617 - DNA, 21 bp, Artificial Sequence
  Description of Artificial Sequence: Synthetic oligonucleotide
ctcacaacaatgagcaaagca

SEQ ID NO: 34618 - DNA, 21 bp, Artificial Sequence
  Description of Artificial Sequence: Synthetic oligonucleotide
ctcacaacaccactcccacac

SEQ ID NO: 34619 - DNA, 21 bp, Artificial Sequence
  Description of Artificial Sequence: Synthetic oligonucleotide
ctcacaacacaagaacactgg

SEQ ID NO: 34620 - DNA, 21 bp, Artificial Sequence
  Description of Artificial Sequence: Synthetic oligonucleotide
ctcacaacaagaccagcattc

SEQ ID NO: 34621 - DNA, 21 bp, Artificial Sequence
  Description of Artificial Sequence: Synthetic oligonucleotide
ctcacaacaagaagcagccca

SEQ ID NO: 34622 - DNA, 21 bp, Artificial Sequence
  Description of Artificial Sequence: Synthetic oligonucleotide
ctcacaacaagcctcaaacca

SEQ ID NO: 34623 - DNA, 21 bp, Artificial Sequence
  Description of Artificial Sequence: Synthetic oligonucleotide
ctcacaacaagcagcttcaca

SEQ ID NO: 34624 - DNA, 21 bp, Artificial Sequence
  Description of Artificial Sequence: Synthetic oligonucleotide
ctcacaacaacaatcaacaac

SEQ ID NO: 34625 - DNA, 21 bp, Artificial Sequence
  Description of Artificial Sequence: Synthetic oligonucleotide
ctcacaacaacaccagcaaaa

SEQ ID NO: 34626 - DNA, 21 bp, Artificial Sequence
  Description of Artificial Sequence: Synthetic oligonucleotide
ctcacagtcggagcaacaatc

SEQ ID NO: 34627 - DNA, 21 bp, Artificial Sequence
  Description of Artificial Sequence: Synthetic oligonucleotide
ctcacagtccaagaaacacaa

SEQ ID NO: 34628 - DNA, 21 bp, Artificial Sequence
  Description of Artificial Sequence: Synthetic oligonucleotide
ctcacagtcagcgcagtcaaa

SEQ ID NO: 34629 - DNA, 21 bp, Artificial Sequence
  Description of Artificial Sequence: Synthetic oligonucleotide
ctcacagtcagcaacctccca

SEQ ID NO: 34630 - DNA, 21 bp, Artificial Sequence
  Description of Artificial Sequence: Synthetic oligonucleotide
ctcacagtcacatgggcagaa

SEQ ID NO: 34631 - DNA, 21 bp, Artificial Sequence
  Description of Artificial Sequence: Synthetic oligonucleotide
ctcacagtcgtcccaagcgga

SEQ ID NO: 34632 - DNA, 21 bp, Artificial Sequence
  Description of Artificial Sequence: Synthetic oligonucleotide
ctcacatacttcgtcgaagaa

SEQ ID NO: 34633 - DNA, 21 bp, Artificial Sequence
  Description of Artificial Sequence: Synthetic oligonucleotide
ctcacatacccaggaagccaa

SEQ ID NO: 34634 - DNA, 21 bp, Artificial Sequence
  Description of Artificial Sequence: Synthetic oligonucleotide
ctcacatacagaggaggagaa

SEQ ID NO: 34635 - DNA, 21 bp, Artificial Sequence
  Description of Artificial Sequence: Synthetic oligonucleotide
ctcacatacagcccacaaaca

SEQ ID NO: 34636 - DNA, 21 bp, Artificial Sequence
  Description of Artificial Sequence: Synthetic oligonucleotide
ctcacatacagcagaagcgac

SEQ ID NO: 34637 - DNA, 21 bp, Artificial Sequence
  Description of Artificial Sequence: Synthetic oligonucleotide
ctcgtcgcaaaaatgacacca

SEQ ID NO: 34638 - DNA, 21 bp, Artificial Sequence
  Description of Artificial Sequence: Synthetic oligonucleotide
ctcgtcgcaagaggaggagca

SEQ ID NO: 34639 - DNA, 21 bp, Artificial Sequence
  Description of Artificial Sequence: Synthetic oligonucleotide
ctcgtcgcaacacaagcacca

SEQ ID NO: 34640 - DNA, 21 bp, Artificial Sequence
  Description of Artificial Sequence: Synthetic oligonucleotide
ctcgtcgcagtcagcacaaca

SEQ ID NO: 34641 - DNA, 21 bp, Artificial Sequence
  Description of Artificial Sequence: Synthetic oligonucleotide
ctcgtcgacagcagaacaatg

SEQ ID NO: 34642 - DNA, 21 bp, Artificial Sequence
  Description of Artificial Sequence: Synthetic oligonucleotide
ctcgtcgaaggactcatcgac

SEQ ID NO: 34643 - DNA, 21 bp, Artificial Sequence
  Description of Artificial Sequence: Synthetic oligonucleotide
ctcgtcgaaaacagaagagaa

SEQ ID NO: 34644 - DNA, 21 bp, Artificial Sequence
  Description of Artificial Sequence: Synthetic oligonucleotide
ctcgtcgaaccaatgaaacac

SEQ ID NO: 34645 - DNA, 21 bp, Artificial Sequence
  Description of Artificial Sequence: Synthetic oligonucleotide
ctcgtcgaaacaaaaggaagc

SEQ ID NO: 34646 - DNA, 21 bp, Artificial Sequence
  Description of Artificial Sequence: Synthetic oligonucleotide
ctcgtcgaaacactcacacac

SEQ ID NO: 34647 - DNA, 21 bp, Artificial Sequence
  Description of Artificial Sequence: Synthetic oligonucleotide
ctcgtcggagaaagccacatc

SEQ ID NO: 34648 - DNA, 21 bp, Artificial Sequence
  Description of Artificial Sequence: Synthetic oligonucleotide
ctcgtcggacacccaacacca

SEQ ID NO: 34649 - DNA, 21 bp, Artificial Sequence
  Description of Artificial Sequence: Synthetic oligonucleotide
ctcgtcggacacacaggaagc

SEQ ID NO: 34650 - DNA, 21 bp, Artificial Sequence
  Description of Artificial Sequence: Synthetic oligonucleotide
ctcgtcggacaagtcgcagtc

SEQ ID NO: 34651 - DNA, 21 bp, Artificial Sequence
  Description of Artificial Sequence: Synthetic oligonucleotide
ctcgtcggaagagcatgctgc

SEQ ID NO: 34652 - DNA, 21 bp, Artificial Sequence
  Description of Artificial Sequence: Synthetic oligonucleotide
ctcgtcggaagactcagcaca

SEQ ID NO: 34653 - DNA, 21 bp, Artificial Sequence
  Description of Artificial Sequence: Synthetic oligonucleotide
ctcgtcggaagcccaccaagc

SEQ ID NO: 34654 - DNA, 21 bp, Artificial Sequence
  Description of Artificial Sequence: Synthetic oligonucleotide
ctcgtccacctcatgacagac

SEQ ID NO: 34655 - DNA, 21 bp, Artificial Sequence
  Description of Artificial Sequence: Synthetic oligonucleotide
ctcgtccacaacagaacaagc

SEQ ID NO: 34656 - DNA, 21 bp, Artificial Sequence
  Description of Artificial Sequence: Synthetic oligonucleotide
ctcgtccactacagcccagac

SEQ ID NO: 34657 - DNA, 21 bp, Artificial Sequence
  Description of Artificial Sequence: Synthetic oligonucleotide
ctcgtcatcccaggaccagga

SEQ ID NO: 34658 - DNA, 21 bp, Artificial Sequence
  Description of Artificial Sequence: Synthetic oligonucleotide
ctcgtcaaagaaagcccaaca

SEQ ID NO: 34659 - DNA, 21 bp, Artificial Sequence
  Description of Artificial Sequence: Synthetic oligonucleotide
ctcgtcaaaggaggaccaaac

SEQ ID NO: 34660 - DNA, 21 bp, Artificial Sequence
  Description of Artificial Sequence: Synthetic oligonucleotide
ctcgtcaaacaaacaacactc

SEQ ID NO: 34661 - DNA, 21 bp, Artificial Sequence
  Description of Artificial Sequence: Synthetic oligonucleotide
ctcgtcaaaagcgtcgaccaa

SEQ ID NO: 34662 - DNA, 21 bp, Artificial Sequence
  Description of Artificial Sequence: Synthetic oligonucleotide
ctcgtcctcggaccaccagca

SEQ ID NO: 34663 - DNA, 21 bp, Artificial Sequence
  Description of Artificial Sequence: Synthetic oligonucleotide
ctcgtcctcggaagcaaaagc

SEQ ID NO: 34664 - DNA, 21 bp, Artificial Sequence
  Description of Artificial Sequence: Synthetic oligonucleotide
ctcgtcctcaacaacgacgga

SEQ ID NO: 34665 - DNA, 21 bp, Artificial Sequence
  Description of Artificial Sequence: Synthetic oligonucleotide
ctcgtcctcccagcaagacaa

SEQ ID NO: 34666 - DNA, 21 bp, Artificial Sequence
  Description of Artificial Sequence: Synthetic oligonucleotide
ctcgtcctcccacaaaaaagc

SEQ ID NO: 34667 - DNA, 21 bp, Artificial Sequence
  Description of Artificial Sequence: Synthetic oligonucleotide
ctcgtcctcagcaacgcaagc

SEQ ID NO: 34668 - DNA, 21 bp, Artificial Sequence
  Description of Artificial Sequence: Synthetic oligonucleotide
ctcgtcatgagcccagcacca

SEQ ID NO: 34669 - DNA, 21 bp, Artificial Sequence
  Description of Artificial Sequence: Synthetic oligonucleotide
ctcgtcatgagcacaagagca

SEQ ID NO: 34670 - DNA, 21 bp, Artificial Sequence
  Description of Artificial Sequence: Synthetic oligonucleotide
ctcgtcatgacaagcggaagc

SEQ ID NO: 34671 - DNA, 21 bp, Artificial Sequence
  Description of Artificial Sequence: Synthetic oligonucleotide
ctcgtcaacgactgctgcaca

SEQ ID NO: 34672 - DNA, 21 bp, Artificial Sequence
  Description of Artificial Sequence: Synthetic oligonucleotide
ctcgtcaacgaaacaacaaga

SEQ ID NO: 34673 - DNA, 21 bp, Artificial Sequence
  Description of Artificial Sequence: Synthetic oligonucleotide
ctcgtcaacaaactcggacca

SEQ ID NO: 34674 - DNA, 21 bp, Artificial Sequence
  Description of Artificial Sequence: Synthetic oligonucleotide
ctcgtcaacaaaagctacaac

SEQ ID NO: 34675 - DNA, 21 bp, Artificial Sequence
  Description of Artificial Sequence: Synthetic oligonucleotide
ctcgtcaacccaggaacaaga

SEQ ID NO: 34676 - DNA, 21 bp, Artificial Sequence
  Description of Artificial Sequence: Synthetic oligonucleotide
ctcgtcaacagcaaagacagc

SEQ ID NO: 34677 - DNA, 21 bp, Artificial Sequence
  Description of Artificial Sequence: Synthetic oligonucleotide
ctcgtcaacacaccaacagaa

SEQ ID NO: 34678 - DNA, 21 bp, Artificial Sequence
  Description of Artificial Sequence: Synthetic oligonucleotide
ctcgtcccagcaagaagcgga

SEQ ID NO: 34679 - DNA, 21 bp, Artificial Sequence
  Description of Artificial Sequence: Synthetic oligonucleotide
ctcgtcccaggactcacagga

SEQ ID NO: 34680 - DNA, 21 bp, Artificial Sequence
  Description of Artificial Sequence: Synthetic oligonucleotide
ctcgtcccaggaatgatcaca

SEQ ID NO: 34681 - DNA, 21 bp, Artificial Sequence
  Description of Artificial Sequence: Synthetic oligonucleotide
ctcgtcccaggagtccacagc

SEQ ID NO: 34682 - DNA, 21 bp, Artificial Sequence
  Description of Artificial Sequence: Synthetic oligonucleotide
ctcgtcccacacagcaacttc

SEQ ID NO: 34683 - DNA, 21 bp, Artificial Sequence
  Description of Artificial Sequence: Synthetic oligonucleotide
ctcgtcccaaaacacatgaac

SEQ ID NO: 34684 - DNA, 21 bp, Artificial Sequence
  Description of Artificial Sequence: Synthetic oligonucleotide
ctcgtcccactcctcccagca

SEQ ID NO: 34685 - DNA, 21 bp, Artificial Sequence
  Description of Artificial Sequence: Synthetic oligonucleotide
ctcgtcccactcccacacagc

SEQ ID NO: 34686 - DNA, 21 bp, Artificial Sequence
  Description of Artificial Sequence: Synthetic oligonucleotide
ctcgtcccactctacacagaa

SEQ ID NO: 34687 - DNA, 21 bp, Artificial Sequence
  Description of Artificial Sequence: Synthetic oligonucleotide
ctcgtcccaaacttccaacca

SEQ ID NO: 34688 - DNA, 21 bp, Artificial Sequence
  Description of Artificial Sequence: Synthetic oligonucleotide
ctcgtcccaaacagcgcagaa

SEQ ID NO: 34689 - DNA, 21 bp, Artificial Sequence
  Description of Artificial Sequence: Synthetic oligonucleotide
ctcgtcccaagagcagcagac

SEQ ID NO: 34690 - DNA, 21 bp, Artificial Sequence
  Description of Artificial Sequence: Synthetic oligonucleotide
ctcgtcccaagaaacagcctc

SEQ ID NO: 34691 - DNA, 21 bp, Artificial Sequence
  Description of Artificial Sequence: Synthetic oligonucleotide
ctcgtcccaagcatccaaaca

SEQ ID NO: 34692 - DNA, 21 bp, Artificial Sequence
  Description of Artificial Sequence: Synthetic oligonucleotide
ctcgtcccaagcctcgaacaa

SEQ ID NO: 34693 - DNA, 21 bp, Artificial Sequence
  Description of Artificial Sequence: Synthetic oligonucleotide
ctcgtcccagtcagcctcagc

SEQ ID NO: 34694 - DNA, 21 bp, Artificial Sequence
  Description of Artificial Sequence: Synthetic oligonucleotide
ctcgtccaactcgacgtcgca

SEQ ID NO: 34695 - DNA, 21 bp, Artificial Sequence
  Description of Artificial Sequence: Synthetic oligonucleotide
ctcgtccaaagcctcggaatg

SEQ ID NO: 34696 - DNA, 21 bp, Artificial Sequence
  Description of Artificial Sequence: Synthetic oligonucleotide
ctcgtcagagcaatggacaca

SEQ ID NO: 34697 - DNA, 21 bp, Artificial Sequence
  Description of Artificial Sequence: Synthetic oligonucleotide
ctcgtcagaggagcaagccac

SEQ ID NO: 34698 - DNA, 21 bp, Artificial Sequence
  Description of Artificial Sequence: Synthetic oligonucleotide
ctcgtcagacacgacaacctc

SEQ ID NO: 34699 - DNA, 21 bp, Artificial Sequence
  Description of Artificial Sequence: Synthetic oligonucleotide
ctcgtcagaaacggactcagc

SEQ ID NO: 34700 - DNA, 21 bp, Artificial Sequence
  Description of Artificial Sequence: Synthetic oligonucleotide
ctcgtcagaccaagcccagca

SEQ ID NO: 34701 - DNA, 21 bp, Artificial Sequence
  Description of Artificial Sequence: Synthetic oligonucleotide
ctcgtcagcggacaccacatg

SEQ ID NO: 34702 - DNA, 21 bp, Artificial Sequence
  Description of Artificial Sequence: Synthetic oligonucleotide
ctcgtcagcggaaacagagtc

SEQ ID NO: 34703 - DNA, 21 bp, Artificial Sequence
  Description of Artificial Sequence: Synthetic oligonucleotide
ctcgtcagcggaacagacaga

SEQ ID NO: 34704 - DNA, 21 bp, Artificial Sequence
  Description of Artificial Sequence: Synthetic oligonucleotide
ctcgtcagccacccaagacca

SEQ ID NO: 34705 - DNA, 21 bp, Artificial Sequence
  Description of Artificial Sequence: Synthetic oligonucleotide
ctcgtcagccacagaagcgca

SEQ ID NO: 34706 - DNA, 21 bp, Artificial Sequence
  Description of Artificial Sequence: Synthetic oligonucleotide
ctcgtcagcaaagacgaaagc

SEQ ID NO: 34707 - DNA, 21 bp, Artificial Sequence
  Description of Artificial Sequence: Synthetic oligonucleotide
ctcgtcagcccagcaagacca

SEQ ID NO: 34708 - DNA, 21 bp, Artificial Sequence
  Description of Artificial Sequence: Synthetic oligonucleotide
ctcgtcagcccagaagaagga

SEQ ID NO: 34709 - DNA, 21 bp, Artificial Sequence
  Description of Artificial Sequence: Synthetic oligonucleotide
ctcgtcagcccaagcctcaca

SEQ ID NO: 34710 - DNA, 21 bp, Artificial Sequence
  Description of Artificial Sequence: Synthetic oligonucleotide
ctcgtcagcagcaaacaccca

SEQ ID NO: 34711 - DNA, 21 bp, Artificial Sequence
  Description of Artificial Sequence: Synthetic oligonucleotide
ctcgtcagcagcccaagaaca

SEQ ID NO: 34712 - DNA, 21 bp, Artificial Sequence
  Description of Artificial Sequence: Synthetic oligonucleotide
ctcgtcagcacaatgacagaa

SEQ ID NO: 34713 - DNA, 21 bp, Artificial Sequence
  Description of Artificial Sequence: Synthetic oligonucleotide
ctcgtcacagcaggaccactc

SEQ ID NO: 34714 - DNA, 21 bp, Artificial Sequence
  Description of Artificial Sequence: Synthetic oligonucleotide
ctcgtcacagcaccaacacca

SEQ ID NO: 34715 - DNA, 21 bp, Artificial Sequence
  Description of Artificial Sequence: Synthetic oligonucleotide
ctcgtcacagcacaacaccca

SEQ ID NO: 34716 - DNA, 21 bp, Artificial Sequence
  Description of Artificial Sequence: Synthetic oligonucleotide
ctcgtcacaggagacgcaagc

SEQ ID NO: 34717 - DNA, 21 bp, Artificial Sequence
  Description of Artificial Sequence: Synthetic oligonucleotide
ctcgtcacacacaactacgca

SEQ ID NO: 34718 - DNA, 21 bp, Artificial Sequence
  Description of Artificial Sequence: Synthetic oligonucleotide
ctcgtcacaatgagaccagtc

SEQ ID NO: 34719 - DNA, 21 bp, Artificial Sequence
  Description of Artificial Sequence: Synthetic oligonucleotide
ctcgtcacaaacgcacacagc

SEQ ID NO: 34720 - DNA, 21 bp, Artificial Sequence
  Description of Artificial Sequence: Synthetic oligonucleotide
ctcgtcacaccaggagacaga

SEQ ID NO: 34721 - DNA, 21 bp, Artificial Sequence
  Description of Artificial Sequence: Synthetic oligonucleotide
ctcgtcacacaaagcaacgaa

SEQ ID NO: 34722 - DNA, 21 bp, Artificial Sequence
  Description of Artificial Sequence: Synthetic oligonucleotide
ctcgtcacatacacaccaatg

SEQ ID NO: 34723 - DNA, 21 bp, Artificial Sequence
  Description of Artificial Sequence: Synthetic oligonucleotide
ctcgtcgtcgcagcacacctc

SEQ ID NO: 34724 - DNA, 21 bp, Artificial Sequence
  Description of Artificial Sequence: Synthetic oligonucleotide
ctcgtcgtcgcagaaagaatc

SEQ ID NO: 34725 - DNA, 21 bp, Artificial Sequence
  Description of Artificial Sequence: Synthetic oligonucleotide
ctcgtcgtcgacgaaatgaca

SEQ ID NO: 34726 - DNA, 21 bp, Artificial Sequence
  Description of Artificial Sequence: Synthetic oligonucleotide
ctcgtcgtcaacagaatggac

SEQ ID NO: 34727 - DNA, 21 bp, Artificial Sequence
  Description of Artificial Sequence: Synthetic oligonucleotide
ctcgtcgtcccaggaaacgga

SEQ ID NO: 34728 - DNA, 21 bp, Artificial Sequence
  Description of Artificial Sequence: Synthetic oligonucleotide
ctcgtctacggacacgaccac

SEQ ID NO: 34729 - DNA, 21 bp, Artificial Sequence
  Description of Artificial Sequence: Synthetic oligonucleotide
ctcgtctacacaagcacaagc

SEQ ID NO: 34730 - DNA, 21 bp, Artificial Sequence
  Description of Artificial Sequence: Synthetic oligonucleotide
ctctgggacctcggaaaccca

SEQ ID NO: 34731 - DNA, 21 bp, Artificial Sequence
  Description of Artificial Sequence: Synthetic oligonucleotide
ctctgggaaacaagcacagac

SEQ ID NO: 34732 - DNA, 21 bp, Artificial Sequence
  Description of Artificial Sequence: Synthetic oligonucleotide
ctctggggagacggaacactc

SEQ ID NO: 34733 - DNA, 21 bp, Artificial Sequence
  Description of Artificial Sequence: Synthetic oligonucleotide
ctctggaacaaaccagacgac

SEQ ID NO: 34734 - DNA, 21 bp, Artificial Sequence
  Description of Artificial Sequence: Synthetic oligonucleotide
ctctggaacagcaacacagca

SEQ ID NO: 34735 - DNA, 21 bp, Artificial Sequence
  Description of Artificial Sequence: Synthetic oligonucleotide
ctctggcaaagcgaagtcgac

SEQ ID NO: 34736 - DNA, 21 bp, Artificial Sequence
  Description of Artificial Sequence: Synthetic oligonucleotide
ctctggagagcagacgacgca

SEQ ID NO: 34737 - DNA, 21 bp, Artificial Sequence
  Description of Artificial Sequence: Synthetic oligonucleotide
ctctggagaagcagcacaaca

SEQ ID NO: 34738 - DNA, 21 bp, Artificial Sequence
  Description of Artificial Sequence: Synthetic oligonucleotide
ctctggacagcagaaagagac

SEQ ID NO: 34739 - DNA, 21 bp, Artificial Sequence
  Description of Artificial Sequence: Synthetic oligonucleotide
ctctggacaggaagcggacca

SEQ ID NO: 34740 - DNA, 21 bp, Artificial Sequence
  Description of Artificial Sequence: Synthetic oligonucleotide
ctctggacaaaccaaccaagc

SEQ ID NO: 34741 - DNA, 21 bp, Artificial Sequence
  Description of Artificial Sequence: Synthetic oligonucleotide
ctctacgcaaacagcaaacca

SEQ ID NO: 34742 - DNA, 21 bp, Artificial Sequence
  Description of Artificial Sequence: Synthetic oligonucleotide
ctctacgacctcagaggagca

SEQ ID NO: 34743 - DNA, 21 bp, Artificial Sequence
  Description of Artificial Sequence: Synthetic oligonucleotide
ctctacgacagccaagacaca

SEQ ID NO: 34744 - DNA, 21 bp, Artificial Sequence
  Description of Artificial Sequence: Synthetic oligonucleotide
ctctacgacacaagcctcctc

SEQ ID NO: 34745 - DNA, 21 bp, Artificial Sequence
  Description of Artificial Sequence: Synthetic oligonucleotide
ctctacgaacacagcagccca

SEQ ID NO: 34746 - DNA, 21 bp, Artificial Sequence
  Description of Artificial Sequence: Synthetic oligonucleotide
ctctacgaatacccaagcgga

SEQ ID NO: 34747 - DNA, 21 bp, Artificial Sequence
  Description of Artificial Sequence: Synthetic oligonucleotide
ctctacggaagcctcgtccca

SEQ ID NO: 34748 - DNA, 21 bp, Artificial Sequence
  Description of Artificial Sequence: Synthetic oligonucleotide
ctctacggaacaagcgcaatc

SEQ ID NO: 34749 - DNA, 21 bp, Artificial Sequence
  Description of Artificial Sequence: Synthetic oligonucleotide
ctctacaaaagcccagaaaca

SEQ ID NO: 34750 - DNA, 21 bp, Artificial Sequence
  Description of Artificial Sequence: Synthetic oligonucleotide
ctctacctcggaagcaaagac

SEQ ID NO: 34751 - DNA, 21 bp, Artificial Sequence
  Description of Artificial Sequence: Synthetic oligonucleotide
ctctacctccaaaacgacaaa

SEQ ID NO: 34752 - DNA, 21 bp, Artificial Sequence
  Description of Artificial Sequence: Synthetic oligonucleotide
ctctacctcacaagcctcgac

SEQ ID NO: 34753 - DNA, 21 bp, Artificial Sequence
  Description of Artificial Sequence: Synthetic oligonucleotide
ctctacaacgacttcagcttc

SEQ ID NO: 34754 - DNA, 21 bp, Artificial Sequence
  Description of Artificial Sequence: Synthetic oligonucleotide
ctctacaacagcagcgacagc

SEQ ID NO: 34755 - DNA, 21 bp, Artificial Sequence
  Description of Artificial Sequence: Synthetic oligonucleotide
ctctacccacacgcaccaagc

SEQ ID NO: 34756 - DNA, 21 bp, Artificial Sequence
  Description of Artificial Sequence: Synthetic oligonucleotide
ctctacccactccaaacagca

SEQ ID NO: 34757 - DNA, 21 bp, Artificial Sequence
  Description of Artificial Sequence: Synthetic oligonucleotide
ctctaccaaggaagcaacagc

SEQ ID NO: 34758 - DNA, 21 bp, Artificial Sequence
  Description of Artificial Sequence: Synthetic oligonucleotide
ctctaccaaggatacagcgca

SEQ ID NO: 34759 - DNA, 21 bp, Artificial Sequence
  Description of Artificial Sequence: Synthetic oligonucleotide
ctctacagcgcagcaagcaaa

SEQ ID NO: 34760 - DNA, 21 bp, Artificial Sequence
  Description of Artificial Sequence: Synthetic oligonucleotide
ctctacagcgaagtcggactc

SEQ ID NO: 34761 - DNA, 21 bp, Artificial Sequence
  Description of Artificial Sequence: Synthetic oligonucleotide
ctctacagcggaacaatccca

SEQ ID NO: 34762 - DNA, 21 bp, Artificial Sequence
  Description of Artificial Sequence: Synthetic oligonucleotide
ctctacagcaacccaaacgtc

SEQ ID NO: 34763 - DNA, 21 bp, Artificial Sequence
  Description of Artificial Sequence: Synthetic oligonucleotide
ctctacagcccactcagcaac

SEQ ID NO: 34764 - DNA, 21 bp, Artificial Sequence
  Description of Artificial Sequence: Synthetic oligonucleotide
ctctacacagcaacagcaaaa

SEQ ID NO: 34765 - DNA, 21 bp, Artificial Sequence
  Description of Artificial Sequence: Synthetic oligonucleotide
ctctacacagacagcgcattc

SEQ ID NO: 34766 - DNA, 21 bp, Artificial Sequence
  Description of Artificial Sequence: Synthetic oligonucleotide
ctctacacaggactcggaaca

SEQ ID NO: 34767 - DNA, 21 bp, Artificial Sequence
  Description of Artificial Sequence: Synthetic oligonucleotide
ctctacacaaaaaacgaagga

SEQ ID NO: 34768 - DNA, 21 bp, Artificial Sequence
  Description of Artificial Sequence: Synthetic oligonucleotide
ctctacacaaaaagcgtccca

SEQ ID NO: 34769 - DNA, 21 bp, Artificial Sequence
  Description of Artificial Sequence: Synthetic oligonucleotide
ctctacacaccaaacggagca

SEQ ID NO: 34770 - DNA, 21 bp, Artificial Sequence
  Description of Artificial Sequence: Synthetic oligonucleotide
ctctacacaagcctcccacaa

SEQ ID NO: 34771 - DNA, 21 bp, Artificial Sequence
  Description of Artificial Sequence: Synthetic oligonucleotide
ctctacacaagcagcggaagc

SEQ ID NO: 34772 - DNA, 21 bp, Artificial Sequence
  Description of Artificial Sequence: Synthetic oligonucleotide
ctctacacagtcacaagcgga

SEQ ID NO: 34773 - DNA, 21 bp, Artificial Sequence
  Description of Artificial Sequence: Synthetic oligonucleotide
ctctacgtcagcgaaaaacca

SEQ ID NO: 34774 - DNA, 21 bp, Artificial Sequence
  Description of Artificial Sequence: Synthetic oligonucleotide
ctctactacccaagcacagaa

SEQ ID NO: 34775 - DNA, 21 bp, Artificial Sequence
  Description of Artificial Sequence: Synthetic oligonucleotide
atggcagcactcaacgacttc

SEQ ID NO: 34776 - DNA, 21 bp, Artificial Sequence
  Description of Artificial Sequence: Synthetic oligonucleotide
atggcagcacaagactacgca

SEQ ID NO: 34777 - DNA, 21 bp, Artificial Sequence
  Description of Artificial Sequence: Synthetic oligonucleotide
atggcagcaagaacaagcaac

SEQ ID NO: 34778 - DNA, 21 bp, Artificial Sequence
  Description of Artificial Sequence: Synthetic oligonucleotide
atggcagcaagcaaaacattc

SEQ ID NO: 34779 - DNA, 21 bp, Artificial Sequence
  Description of Artificial Sequence: Synthetic oligonucleotide
atggcagaattcgtccacaga

SEQ ID NO: 34780 - DNA, 21 bp, Artificial Sequence
  Description of Artificial Sequence: Synthetic oligonucleotide
atggcaggaaaagcaagccac

SEQ ID NO: 34781 - DNA, 21 bp, Artificial Sequence
  Description of Artificial Sequence: Synthetic oligonucleotide
atggcaggaaacctcgtcaca

SEQ ID NO: 34782 - DNA, 21 bp, Artificial Sequence
  Description of Artificial Sequence: Synthetic oligonucleotide
atggcaaaactcacagtcagc

SEQ ID NO: 34783 - DNA, 21 bp, Artificial Sequence
  Description of Artificial Sequence: Synthetic oligonucleotide
atggcactccaaggaagcctc

SEQ ID NO: 34784 - DNA, 21 bp, Artificial Sequence
  Description of Artificial Sequence: Synthetic oligonucleotide
atggcactcagactcgtcaac

SEQ ID NO: 34785 - DNA, 21 bp, Artificial Sequence
  Description of Artificial Sequence: Synthetic oligonucleotide
atggcaaacatgagcagccca

SEQ ID NO: 34786 - DNA, 21 bp, Artificial Sequence
  Description of Artificial Sequence: Synthetic oligonucleotide
atggcaccagtcagagtccca

SEQ ID NO: 34787 - DNA, 21 bp, Artificial Sequence
  Description of Artificial Sequence: Synthetic oligonucleotide
atggcaagagcactcccacca

SEQ ID NO: 34788 - DNA, 21 bp, Artificial Sequence
  Description of Artificial Sequence: Synthetic oligonucleotide
atggcaagagacgtcgacaga

SEQ ID NO: 34789 - DNA, 21 bp, Artificial Sequence
  Description of Artificial Sequence: Synthetic oligonucleotide
atggcaagagaaacaacatac

SEQ ID NO: 34790 - DNA, 21 bp, Artificial Sequence
  Description of Artificial Sequence: Synthetic oligonucleotide
atggcaagcgcaacaccagtc

SEQ ID NO: 34791 - DNA, 21 bp, Artificial Sequence
  Description of Artificial Sequence: Synthetic oligonucleotide
atggcaagcggacaaagcctc

SEQ ID NO: 34792 - DNA, 21 bp, Artificial Sequence
  Description of Artificial Sequence: Synthetic oligonucleotide
atggcaagccacgtcccagtc

SEQ ID NO: 34793 - DNA, 21 bp, Artificial Sequence
  Description of Artificial Sequence: Synthetic oligonucleotide
atggcaagcccatacagcagc

SEQ ID NO: 34794 - DNA, 21 bp, Artificial Sequence
  Description of Artificial Sequence: Synthetic oligonucleotide
atggcaagccaaatcagacca

SEQ ID NO: 34795 - DNA, 21 bp, Artificial Sequence
  Description of Artificial Sequence: Synthetic oligonucleotide
atggcaagcagctacaacgac

SEQ ID NO: 34796 - DNA, 21 bp, Artificial Sequence
  Description of Artificial Sequence: Synthetic oligonucleotide
atggcaagcacagaaagcaga

SEQ ID NO: 34797 - DNA, 21 bp, Artificial Sequence
  Description of Artificial Sequence: Synthetic oligonucleotide
atggcaacagcaccactccac

SEQ ID NO: 34798 - DNA, 21 bp, Artificial Sequence
  Description of Artificial Sequence: Synthetic oligonucleotide
atggcaacagacagaagatac

SEQ ID NO: 34799 - DNA, 21 bp, Artificial Sequence
  Description of Artificial Sequence: Synthetic oligonucleotide
atggcaacacacgtcatggga

SEQ ID NO: 34800 - DNA, 21 bp, Artificial Sequence
  Description of Artificial Sequence: Synthetic oligonucleotide
atggcagtcaaagtcggagaa

SEQ ID NO: 34801 - DNA, 21 bp, Artificial Sequence
  Description of Artificial Sequence: Synthetic oligonucleotide
atggcataccaaccaacactc

SEQ ID NO: 34802 - DNA, 21 bp, Artificial Sequence
  Description of Artificial Sequence: Synthetic oligonucleotide
atggcataccaacaaatccca

SEQ ID NO: 34803 - DNA, 21 bp, Artificial Sequence
  Description of Artificial Sequence: Synthetic oligonucleotide
atgtgcgacagcgacagacca

SEQ ID NO: 34804 - DNA, 21 bp, Artificial Sequence
  Description of Artificial Sequence: Synthetic oligonucleotide
atggacgacagagcaggattc

SEQ ID NO: 34805 - DNA, 21 bp, Artificial Sequence
  Description of Artificial Sequence: Synthetic oligonucleotide
atggacgaaccagaaccaagc

SEQ ID NO: 34806 - DNA, 21 bp, Artificial Sequence
  Description of Artificial Sequence: Synthetic oligonucleotide
atggacaaaatcctcacaagc

SEQ ID NO: 34807 - DNA, 21 bp, Artificial Sequence
  Description of Artificial Sequence: Synthetic oligonucleotide
atggacctcacaggaccagtc

SEQ ID NO: 34808 - DNA, 21 bp, Artificial Sequence
  Description of Artificial Sequence: Synthetic oligonucleotide
atggacatgggaggaagccca

SEQ ID NO: 34809 - DNA, 21 bp, Artificial Sequence
  Description of Artificial Sequence: Synthetic oligonucleotide
atggacaacctcagacaaagc

SEQ ID NO: 34810 - DNA, 21 bp, Artificial Sequence
  Description of Artificial Sequence: Synthetic oligonucleotide
atggacagagcactccacgga

SEQ ID NO: 34811 - DNA, 21 bp, Artificial Sequence
  Description of Artificial Sequence: Synthetic oligonucleotide
atggacagaatgacactcatg

SEQ ID NO: 34812 - DNA, 21 bp, Artificial Sequence
  Description of Artificial Sequence: Synthetic oligonucleotide
atggacagaaacttcgtcatg

SEQ ID NO: 34813 - DNA, 21 bp, Artificial Sequence
  Description of Artificial Sequence: Synthetic oligonucleotide
atggacagaccaagcacaagc

SEQ ID NO: 34814 - DNA, 21 bp, Artificial Sequence
  Description of Artificial Sequence: Synthetic oligonucleotide
atggacagcgcagactacgaa

SEQ ID NO: 34815 - DNA, 21 bp, Artificial Sequence
  Description of Artificial Sequence: Synthetic oligonucleotide
atggacagcctcccaccacca

SEQ ID NO: 34816 - DNA, 21 bp, Artificial Sequence
  Description of Artificial Sequence: Synthetic oligonucleotide
atggacagcagaacactcctc

SEQ ID NO: 34817 - DNA, 21 bp, Artificial Sequence
  Description of Artificial Sequence: Synthetic oligonucleotide
atggacagcacaagcccacca

SEQ ID NO: 34818 - DNA, 21 bp, Artificial Sequence
  Description of Artificial Sequence: Synthetic oligonucleotide
atggacgtcagccacggaagc

SEQ ID NO: 34819 - DNA, 21 bp, Artificial Sequence
  Description of Artificial Sequence: Synthetic oligonucleotide
atggaattcggaacaacacca

SEQ ID NO: 34820 - DNA, 21 bp, Artificial Sequence
  Description of Artificial Sequence: Synthetic oligonucleotide
atggaattcgtcagcacattc

SEQ ID NO: 34821 - DNA, 21 bp, Artificial Sequence
  Description of Artificial Sequence: Synthetic oligonucleotide
atggaaggaagcggaagaaac

SEQ ID NO: 34822 - DNA, 21 bp, Artificial Sequence
  Description of Artificial Sequence: Synthetic oligonucleotide
atggaaatcgaaagcctcaac

SEQ ID NO: 34823 - DNA, 21 bp, Artificial Sequence
  Description of Artificial Sequence: Synthetic oligonucleotide
atggaaatcacaagagcacca

SEQ ID NO: 34824 - DNA, 21 bp, Artificial Sequence
  Description of Artificial Sequence: Synthetic oligonucleotide
atggaaaaagcaacaccaagc

SEQ ID NO: 34825 - DNA, 21 bp, Artificial Sequence
  Description of Artificial Sequence: Synthetic oligonucleotide
atggaaaaactcaaacaaaac

SEQ ID NO: 34826 - DNA, 21 bp, Artificial Sequence
  Description of Artificial Sequence: Synthetic oligonucleotide
atggaactcatcgaaggacca

SEQ ID NO: 34827 - DNA, 21 bp, Artificial Sequence
  Description of Artificial Sequence: Synthetic oligonucleotide
atggaaaacacaacaagaagc

SEQ ID NO: 34828 - DNA, 21 bp, Artificial Sequence
  Description of Artificial Sequence: Synthetic oligonucleotide
atggaaccaaaaagaagctac

SEQ ID NO: 34829 - DNA, 21 bp, Artificial Sequence
  Description of Artificial Sequence: Synthetic oligonucleotide
atggaaccaccaatcaaccca

SEQ ID NO: 34830 - DNA, 21 bp, Artificial Sequence
  Description of Artificial Sequence: Synthetic oligonucleotide
atggaaagaacactctgcaac

SEQ ID NO: 34831 - DNA, 21 bp, Artificial Sequence
  Description of Artificial Sequence: Synthetic oligonucleotide
atggaaagcctcggactcgca

SEQ ID NO: 34832 - DNA, 21 bp, Artificial Sequence
  Description of Artificial Sequence: Synthetic oligonucleotide
atggaaagcaaccacagcaga

SEQ ID NO: 34833 - DNA, 21 bp, Artificial Sequence
  Description of Artificial Sequence: Synthetic oligonucleotide
atggaaagcagaccaagctac

SEQ ID NO: 34834 - DNA, 21 bp, Artificial Sequence
  Description of Artificial Sequence: Synthetic oligonucleotide
atggaaacaaaaagcatcagc

SEQ ID NO: 34835 - DNA, 21 bp, Artificial Sequence
  Description of Artificial Sequence: Synthetic oligonucleotide
atggaaacaaactggccagca

SEQ ID NO: 34836 - DNA, 21 bp, Artificial Sequence
  Description of Artificial Sequence: Synthetic oligonucleotide
atggaaacaagccacagaatg

SEQ ID NO: 34837 - DNA, 21 bp, Artificial Sequence
  Description of Artificial Sequence: Synthetic oligonucleotide
atgttcggaaacgcagaatac

SEQ ID NO: 34838 - DNA, 21 bp, Artificial Sequence
  Description of Artificial Sequence: Synthetic oligonucleotide
atgttcggaacaagccaagac

SEQ ID NO: 34839 - DNA, 21 bp, Artificial Sequence
  Description of Artificial Sequence: Synthetic oligonucleotide
atgttcctcaaagtcagccca

SEQ ID NO: 34840 - DNA, 21 bp, Artificial Sequence
  Description of Artificial Sequence: Synthetic oligonucleotide
atgttcagagtcgtcagcgac

SEQ ID NO: 34841 - DNA, 21 bp, Artificial Sequence
  Description of Artificial Sequence: Synthetic oligonucleotide
atgttcagcagcacaaaacca

SEQ ID NO: 34842 - DNA, 21 bp, Artificial Sequence
  Description of Artificial Sequence: Synthetic oligonucleotide
atgttcacagacagcagaagc

SEQ ID NO: 34843 - DNA, 21 bp, Artificial Sequence
  Description of Artificial Sequence: Synthetic oligonucleotide
atgttcgtcaacgaactcaaa

SEQ ID NO: 34844 - DNA, 21 bp, Artificial Sequence
  Description of Artificial Sequence: Synthetic oligonucleotide
atgggagcaacacacccaaga

SEQ ID NO: 34845 - DNA, 21 bp, Artificial Sequence
  Description of Artificial Sequence: Synthetic oligonucleotide
atgggagacagaagcagaaac

SEQ ID NO: 34846 - DNA, 21 bp, Artificial Sequence
  Description of Artificial Sequence: Synthetic oligonucleotide
atgggagactacacaacaaaa

SEQ ID NO: 34847 - DNA, 21 bp, Artificial Sequence
  Description of Artificial Sequence: Synthetic oligonucleotide
atgggagaaagactcttcagc

SEQ ID NO: 34848 - DNA, 21 bp, Artificial Sequence
  Description of Artificial Sequence: Synthetic oligonucleotide
atgggaggacacggaagaaca

SEQ ID NO: 34849 - DNA, 21 bp, Artificial Sequence
  Description of Artificial Sequence: Synthetic oligonucleotide
atgggaggaaacagcccattc

SEQ ID NO: 34850 - DNA, 21 bp, Artificial Sequence
  Description of Artificial Sequence: Synthetic oligonucleotide
atgggaggaacaagaggaaca

SEQ ID NO: 34851 - DNA, 21 bp, Artificial Sequence
  Description of Artificial Sequence: Synthetic oligonucleotide
atgggaggaacatactgcaga

SEQ ID NO: 34852 - DNA, 21 bp, Artificial Sequence
  Description of Artificial Sequence: Synthetic oligonucleotide
atgggacacagcgacacacca

SEQ ID NO: 34853 - DNA, 21 bp, Artificial Sequence
  Description of Artificial Sequence: Synthetic oligonucleotide
atgggacacacaccaagagaa

SEQ ID NO: 34854 - DNA, 21 bp, Artificial Sequence
  Description of Artificial Sequence: Synthetic oligonucleotide
atgggaaaaacagcagaaaga

SEQ ID NO: 34855 - DNA, 21 bp, Artificial Sequence
  Description of Artificial Sequence: Synthetic oligonucleotide
atgggactcggaagcagcaac

SEQ ID NO: 34856 - DNA, 21 bp, Artificial Sequence
  Description of Artificial Sequence: Synthetic oligonucleotide
atgggactcagaccagaagga

SEQ ID NO: 34857 - DNA, 21 bp, Artificial Sequence
  Description of Artificial Sequence: Synthetic oligonucleotide
atgggaatgcacggaacaagc

SEQ ID NO: 34858 - DNA, 21 bp, Artificial Sequence
  Description of Artificial Sequence: Synthetic oligonucleotide
atgggaaaccacgcaggaagc

SEQ ID NO: 34859 - DNA, 21 bp, Artificial Sequence
  Description of Artificial Sequence: Synthetic oligonucleotide
atgggaaacagcctcaaacaa

SEQ ID NO: 34860 - DNA, 21 bp, Artificial Sequence
  Description of Artificial Sequence: Synthetic oligonucleotide
atgggaccagacggaagcatc

SEQ ID NO: 34861 - DNA, 21 bp, Artificial Sequence
  Description of Artificial Sequence: Synthetic oligonucleotide
atgggaccaatcacaccacaa

SEQ ID NO: 34862 - DNA, 21 bp, Artificial Sequence
  Description of Artificial Sequence: Synthetic oligonucleotide
atgggacaaaacatggcactc

SEQ ID NO: 34863 - DNA, 21 bp, Artificial Sequence
  Description of Artificial Sequence: Synthetic oligonucleotide
atgggaagagacgaaccagga

SEQ ID NO: 34864 - DNA, 21 bp, Artificial Sequence
  Description of Artificial Sequence: Synthetic oligonucleotide
atgggaagcggatacacaatg

SEQ ID NO: 34865 - DNA, 21 bp, Artificial Sequence
  Description of Artificial Sequence: Synthetic oligonucleotide
atgggaagcacaatcgcactc

SEQ ID NO: 34866 - DNA, 21 bp, Artificial Sequence
  Description of Artificial Sequence: Synthetic oligonucleotide
atgggaagcgtccacaacctc

SEQ ID NO: 34867 - DNA, 21 bp, Artificial Sequence
  Description of Artificial Sequence: Synthetic oligonucleotide
atgggaagcgtcatcggaaca

SEQ ID NO: 34868 - DNA, 21 bp, Artificial Sequence
  Description of Artificial Sequence: Synthetic oligonucleotide
atgggaacaacacacacaagc

SEQ ID NO: 34869 - DNA, 21 bp, Artificial Sequence
  Description of Artificial Sequence: Synthetic oligonucleotide
atgggaacaacaccaacactc

SEQ ID NO: 34870 - DNA, 21 bp, Artificial Sequence
  Description of Artificial Sequence: Synthetic oligonucleotide
atgggagtcagaaacgcagca

SEQ ID NO: 34871 - DNA, 21 bp, Artificial Sequence
  Description of Artificial Sequence: Synthetic oligonucleotide
atgggatacctcacaggagaa

SEQ ID NO: 34872 - DNA, 21 bp, Artificial Sequence
  Description of Artificial Sequence: Synthetic oligonucleotide
atgcacgacgcagacaaacca

SEQ ID NO: 34873 - DNA, 21 bp, Artificial Sequence
  Description of Artificial Sequence: Synthetic oligonucleotide
atgcacgacttcccagaactc

SEQ ID NO: 34874 - DNA, 21 bp, Artificial Sequence
  Description of Artificial Sequence: Synthetic oligonucleotide
atgcacgacagcccacaagca

SEQ ID NO: 34875 - DNA, 21 bp, Artificial Sequence
  Description of Artificial Sequence: Synthetic oligonucleotide
atgcacgaaagcctctaccca

SEQ ID NO: 34876 - DNA, 21 bp, Artificial Sequence
  Description of Artificial Sequence: Synthetic oligonucleotide
atgcacttcagcgcagaacca

SEQ ID NO: 34877 - DNA, 21 bp, Artificial Sequence
  Description of Artificial Sequence: Synthetic oligonucleotide
atgcaccacgcaacagcacca

SEQ ID NO: 34878 - DNA, 21 bp, Artificial Sequence
  Description of Artificial Sequence: Synthetic oligonucleotide
atgcacccagcaccactcaga

SEQ ID NO: 34879 - DNA, 21 bp, Artificial Sequence
  Description of Artificial Sequence: Synthetic oligonucleotide
atgcacccaggaggaggaagc

SEQ ID NO: 34880 - DNA, 21 bp, Artificial Sequence
  Description of Artificial Sequence: Synthetic oligonucleotide
atgcaccaaagagacggagca

SEQ ID NO: 34881 - DNA, 21 bp, Artificial Sequence
  Description of Artificial Sequence: Synthetic oligonucleotide
atgcaccaaacaagcatggga

SEQ ID NO: 34882 - DNA, 21 bp, Artificial Sequence
  Description of Artificial Sequence: Synthetic oligonucleotide
atgcacagcaaaggagcaaac

SEQ ID NO: 34883 - DNA, 21 bp, Artificial Sequence
  Description of Artificial Sequence: Synthetic oligonucleotide
atgcacagcccacaaacacac

SEQ ID NO: 34884 - DNA, 21 bp, Artificial Sequence
  Description of Artificial Sequence: Synthetic oligonucleotide
atgcacagcagcccactcgac

SEQ ID NO: 34885 - DNA, 21 bp, Artificial Sequence
  Description of Artificial Sequence: Synthetic oligonucleotide
atgcacagcacagtcccagca

SEQ ID NO: 34886 - DNA, 21 bp, Artificial Sequence
  Description of Artificial Sequence: Synthetic oligonucleotide
atgatcgacagagtcagaaca

SEQ ID NO: 34887 - DNA, 21 bp, Artificial Sequence
  Description of Artificial Sequence: Synthetic oligonucleotide
atgatcgaaatcaaagaactc

SEQ ID NO: 34888 - DNA, 21 bp, Artificial Sequence
  Description of Artificial Sequence: Synthetic oligonucleotide
atgatcgaagtcctcccaagc

SEQ ID NO: 34889 - DNA, 21 bp, Artificial Sequence
  Description of Artificial Sequence: Synthetic oligonucleotide
atgatcggagacgcaccagca

SEQ ID NO: 34890 - DNA, 21 bp, Artificial Sequence
  Description of Artificial Sequence: Synthetic oligonucleotide
atgatcggaaaaagcacagac

SEQ ID NO: 34891 - DNA, 21 bp, Artificial Sequence
  Description of Artificial Sequence: Synthetic oligonucleotide
atgatcaaaaaagactacgca

SEQ ID NO: 34892 - DNA, 21 bp, Artificial Sequence
  Description of Artificial Sequence: Synthetic oligonucleotide
atgatcaaaacaaacagcgtc

SEQ ID NO: 34893 - DNA, 21 bp, Artificial Sequence
  Description of Artificial Sequence: Synthetic oligonucleotide
atgatcaacgcaaacacaaac

SEQ ID NO: 34894 - DNA, 21 bp, Artificial Sequence
  Description of Artificial Sequence: Synthetic oligonucleotide
atgatcccagtcagaccagac

SEQ ID NO: 34895 - DNA, 21 bp, Artificial Sequence
  Description of Artificial Sequence: Synthetic oligonucleotide
atgatcagcgaaccactcaca

SEQ ID NO: 34896 - DNA, 21 bp, Artificial Sequence
  Description of Artificial Sequence: Synthetic oligonucleotide
atgatcagcggaagaacaaca

SEQ ID NO: 34897 - DNA, 21 bp, Artificial Sequence
  Description of Artificial Sequence: Synthetic oligonucleotide
atgatcagccaccaaccacca

SEQ ID NO: 34898 - DNA, 21 bp, Artificial Sequence
  Description of Artificial Sequence: Synthetic oligonucleotide
atgatcagcatccaacaaaca

SEQ ID NO: 34899 - DNA, 21 bp, Artificial Sequence
  Description of Artificial Sequence: Synthetic oligonucleotide
atgatcagcagcatgctcgga

SEQ ID NO: 34900 - DNA, 21 bp, Artificial Sequence
  Description of Artificial Sequence: Synthetic oligonucleotide
atgatcgtcacaacaccagaa

SEQ ID NO: 34901 - DNA, 21 bp, Artificial Sequence
  Description of Artificial Sequence: Synthetic oligonucleotide
atgaaagcagcagtcagagaa

SEQ ID NO: 34902 - DNA, 21 bp, Artificial Sequence
  Description of Artificial Sequence: Synthetic oligonucleotide
atgaaagcagacccagaatgg

SEQ ID NO: 34903 - DNA, 21 bp, Artificial Sequence
  Description of Artificial Sequence: Synthetic oligonucleotide
atgaaagacaacaacgtcaca

SEQ ID NO: 34904 - DNA, 21 bp, Artificial Sequence
  Description of Artificial Sequence: Synthetic oligonucleotide
atgaaacacgcagcacaactc

SEQ ID NO: 34905 - DNA, 21 bp, Artificial Sequence
  Description of Artificial Sequence: Synthetic oligonucleotide
atgaaacacccacaatacaac

SEQ ID NO: 34906 - DNA, 21 bp, Artificial Sequence
  Description of Artificial Sequence: Synthetic oligonucleotide
atgaaaatgaacagaaacgaa

SEQ ID NO: 34907 - DNA, 21 bp, Artificial Sequence
  Description of Artificial Sequence: Synthetic oligonucleotide
atgaaaccaggactcccaatg

SEQ ID NO: 34908 - DNA, 21 bp, Artificial Sequence
  Description of Artificial Sequence: Synthetic oligonucleotide
atgaaaccactcgcagcaagc

SEQ ID NO: 34909 - DNA, 21 bp, Artificial Sequence
  Description of Artificial Sequence: Synthetic oligonucleotide
atgaaaccaacaagccaagtc

SEQ ID NO: 34910 - DNA, 21 bp, Artificial Sequence
  Description of Artificial Sequence: Synthetic oligonucleotide
atgaaaagcggactcacaatg

SEQ ID NO: 34911 - DNA, 21 bp, Artificial Sequence
  Description of Artificial Sequence: Synthetic oligonucleotide
atgaaaagcatcatcccaagc

SEQ ID NO: 34912 - DNA, 21 bp, Artificial Sequence
  Description of Artificial Sequence: Synthetic oligonucleotide
atgaaaagcccatacggactc

SEQ ID NO: 34913 - DNA, 21 bp, Artificial Sequence
  Description of Artificial Sequence: Synthetic oligonucleotide
atgaaaagccaaagcgaccca

SEQ ID NO: 34914 - DNA, 21 bp, Artificial Sequence
  Description of Artificial Sequence: Synthetic oligonucleotide
atgaaaagcagcgaaagcaga

SEQ ID NO: 34915 - DNA, 21 bp, Artificial Sequence
  Description of Artificial Sequence: Synthetic oligonucleotide
atgaaaacagaactcccagca

SEQ ID NO: 34916 - DNA, 21 bp, Artificial Sequence
  Description of Artificial Sequence: Synthetic oligonucleotide
atgaaaacaccaccacaaagc

SEQ ID NO: 34917 - DNA, 21 bp, Artificial Sequence
  Description of Artificial Sequence: Synthetic oligonucleotide
atgaaatgggacggaaaagca

SEQ ID NO: 34918 - DNA, 21 bp, Artificial Sequence
  Description of Artificial Sequence: Synthetic oligonucleotide
atgaaatacagcgacatcgga

SEQ ID NO: 34919 - DNA, 21 bp, Artificial Sequence
  Description of Artificial Sequence: Synthetic oligonucleotide
atgctcgacgacatcaacgaa

SEQ ID NO: 34920 - DNA, 21 bp, Artificial Sequence
  Description of Artificial Sequence: Synthetic oligonucleotide
atgctcgacacaacaaaaaga

SEQ ID NO: 34921 - DNA, 21 bp, Artificial Sequence
  Description of Artificial Sequence: Synthetic oligonucleotide
atgctcgaaatgaaccaaaca

SEQ ID NO: 34922 - DNA, 21 bp, Artificial Sequence
  Description of Artificial Sequence: Synthetic oligonucleotide
atgctcggacacctcacagca

SEQ ID NO: 34923 - DNA, 21 bp, Artificial Sequence
  Description of Artificial Sequence: Synthetic oligonucleotide
atgctcggactcagccacaca

SEQ ID NO: 34924 - DNA, 21 bp, Artificial Sequence
  Description of Artificial Sequence: Synthetic oligonucleotide
atgctccacccaacagcaaca

SEQ ID NO: 34925 - DNA, 21 bp, Artificial Sequence
  Description of Artificial Sequence: Synthetic oligonucleotide
atgctccacagcagcggagca

SEQ ID NO: 34926 - DNA, 21 bp, Artificial Sequence
  Description of Artificial Sequence: Synthetic oligonucleotide
atgctcaaatacacagaacac

SEQ ID NO: 34927 - DNA, 21 bp, Artificial Sequence
  Description of Artificial Sequence: Synthetic oligonucleotide
atgctcctcccaacaacaaaa

SEQ ID NO: 34928 - DNA, 21 bp, Artificial Sequence
  Description of Artificial Sequence: Synthetic oligonucleotide
atgctcccagacagcaacgca

SEQ ID NO: 34929 - DNA, 21 bp, Artificial Sequence
  Description of Artificial Sequence: Synthetic oligonucleotide
atgctcccattcgacacagac

SEQ ID NO: 34930 - DNA, 21 bp, Artificial Sequence
  Description of Artificial Sequence: Synthetic oligonucleotide
atgctcccaggagacagcgca

SEQ ID NO: 34931 - DNA, 21 bp, Artificial Sequence
  Description of Artificial Sequence: Synthetic oligonucleotide
atgctcccaggaacaccacac

SEQ ID NO: 34932 - DNA, 21 bp, Artificial Sequence
  Description of Artificial Sequence: Synthetic oligonucleotide
atgctccaaggacaactcagc

SEQ ID NO: 34933 - DNA, 21 bp, Artificial Sequence
  Description of Artificial Sequence: Synthetic oligonucleotide
atgctccaaaacggacaaaga

SEQ ID NO: 34934 - DNA, 21 bp, Artificial Sequence
  Description of Artificial Sequence: Synthetic oligonucleotide
atgctcagaatcgcaggagac

SEQ ID NO: 34935 - DNA, 21 bp, Artificial Sequence
  Description of Artificial Sequence: Synthetic oligonucleotide
atgctcagacaaggactccaa

SEQ ID NO: 34936 - DNA, 21 bp, Artificial Sequence
  Description of Artificial Sequence: Synthetic oligonucleotide
atgctcagaacaagccaagac

SEQ ID NO: 34937 - DNA, 21 bp, Artificial Sequence
  Description of Artificial Sequence: Synthetic oligonucleotide
atgctcagcggagaaatgcac

SEQ ID NO: 34938 - DNA, 21 bp, Artificial Sequence
  Description of Artificial Sequence: Synthetic oligonucleotide
atgctcagcaacgaagtcatc

SEQ ID NO: 34939 - DNA, 21 bp, Artificial Sequence
  Description of Artificial Sequence: Synthetic oligonucleotide
atgctcagcagagacgaccaa

SEQ ID NO: 34940 - DNA, 21 bp, Artificial Sequence
  Description of Artificial Sequence: Synthetic oligonucleotide
atgctcagcagactcgcacaa

SEQ ID NO: 34941 - DNA, 21 bp, Artificial Sequence
  Description of Artificial Sequence: Synthetic oligonucleotide
atgatggacagaatcgaagga

SEQ ID NO: 34942 - DNA, 21 bp, Artificial Sequence
  Description of Artificial Sequence: Synthetic oligonucleotide
atgatggaactccaactccca

SEQ ID NO: 34943 - DNA, 21 bp, Artificial Sequence
  Description of Artificial Sequence: Synthetic oligonucleotide
atgatgggaaacagcaaagga

SEQ ID NO: 34944 - DNA, 21 bp, Artificial Sequence
  Description of Artificial Sequence: Synthetic oligonucleotide
atgatgcacgcaggagcacaa

SEQ ID NO: 34945 - DNA, 21 bp, Artificial Sequence
  Description of Artificial Sequence: Synthetic oligonucleotide
atgatgcaccaagaagacagc

SEQ ID NO: 34946 - DNA, 21 bp, Artificial Sequence
  Description of Artificial Sequence: Synthetic oligonucleotide
atgatgaacatgagaggagga

SEQ ID NO: 34947 - DNA, 21 bp, Artificial Sequence
  Description of Artificial Sequence: Synthetic oligonucleotide
atgatgccacaagaaatcgtc

SEQ ID NO: 34948 - DNA, 21 bp, Artificial Sequence
  Description of Artificial Sequence: Synthetic oligonucleotide
atgatgagcgacaacgcaaaa

SEQ ID NO: 34949 - DNA, 21 bp, Artificial Sequence
  Description of Artificial Sequence: Synthetic oligonucleotide
atgatgacagacagccaaaga

SEQ ID NO: 34950 - DNA, 21 bp, Artificial Sequence
  Description of Artificial Sequence: Synthetic oligonucleotide
atgatgacaggagcaagcgac

SEQ ID NO: 34951 - DNA, 21 bp, Artificial Sequence
  Description of Artificial Sequence: Synthetic oligonucleotide
atgatgacaaaaacaggaaca

SEQ ID NO: 34952 - DNA, 21 bp, Artificial Sequence
  Description of Artificial Sequence: Synthetic oligonucleotide
atgatgacaagcgcaggacca

SEQ ID NO: 34953 - DNA, 21 bp, Artificial Sequence
  Description of Artificial Sequence: Synthetic oligonucleotide
atgaacgcattcaaacaagaa

SEQ ID NO: 34954 - DNA, 21 bp, Artificial Sequence
  Description of Artificial Sequence: Synthetic oligonucleotide
atgaacgcaaaatgctgcagc

SEQ ID NO: 34955 - DNA, 21 bp, Artificial Sequence
  Description of Artificial Sequence: Synthetic oligonucleotide
atgaacgcaagactcatcgac

SEQ ID NO: 34956 - DNA, 21 bp, Artificial Sequence
  Description of Artificial Sequence: Synthetic oligonucleotide
atgaacgcaagcgcaaacagc

SEQ ID NO: 34957 - DNA, 21 bp, Artificial Sequence
  Description of Artificial Sequence: Synthetic oligonucleotide
atgaacgcaagcacaatgatc

SEQ ID NO: 34958 - DNA, 21 bp, Artificial Sequence
  Description of Artificial Sequence: Synthetic oligonucleotide
atgaacggaagcctcccaatg

SEQ ID NO: 34959 - DNA, 21 bp, Artificial Sequence
  Description of Artificial Sequence: Synthetic oligonucleotide
atgaacggaagcagacaaatg

SEQ ID NO: 34960 - DNA, 21 bp, Artificial Sequence
  Description of Artificial Sequence: Synthetic oligonucleotide
atgaaccacggagcaaactac

SEQ ID NO: 34961 - DNA, 21 bp, Artificial Sequence
  Description of Artificial Sequence: Synthetic oligonucleotide
atgaacaaagcaagcttcgca

SEQ ID NO: 34962 - DNA, 21 bp, Artificial Sequence
  Description of Artificial Sequence: Synthetic oligonucleotide
atgaacaaaggaacagtcgca

SEQ ID NO: 34963 - DNA, 21 bp, Artificial Sequence
  Description of Artificial Sequence: Synthetic oligonucleotide
atgaacaaactcaaagtcgaa

SEQ ID NO: 34964 - DNA, 21 bp, Artificial Sequence
  Description of Artificial Sequence: Synthetic oligonucleotide
atgaacctccacaacccagca

SEQ ID NO: 34965 - DNA, 21 bp, Artificial Sequence
  Description of Artificial Sequence: Synthetic oligonucleotide
atgaacctcaaactcagccca

SEQ ID NO: 34966 - DNA, 21 bp, Artificial Sequence
  Description of Artificial Sequence: Synthetic oligonucleotide
atgaacctcagaatggcacca

SEQ ID NO: 34967 - DNA, 21 bp, Artificial Sequence
  Description of Artificial Sequence: Synthetic oligonucleotide
atgaacctcagcacaaaacca

SEQ ID NO: 34968 - DNA, 21 bp, Artificial Sequence
  Description of Artificial Sequence: Synthetic oligonucleotide
atgaacaacctcagcggaaga

SEQ ID NO: 34969 - DNA, 21 bp, Artificial Sequence
  Description of Artificial Sequence: Synthetic oligonucleotide
atgaacccaatcagcaaatgc

SEQ ID NO: 34970 - DNA, 21 bp, Artificial Sequence
  Description of Artificial Sequence: Synthetic oligonucleotide
atgaacccactcccataccca

SEQ ID NO: 34971 - DNA, 21 bp, Artificial Sequence
  Description of Artificial Sequence: Synthetic oligonucleotide
atgaacccaagcgtcgaactc

SEQ ID NO: 34972 - DNA, 21 bp, Artificial Sequence
  Description of Artificial Sequence: Synthetic oligonucleotide
atgaaccaaacaaaaccatac

SEQ ID NO: 34973 - DNA, 21 bp, Artificial Sequence
  Description of Artificial Sequence: Synthetic oligonucleotide
atgaaccaagtcagaagcctc

SEQ ID NO: 34974 - DNA, 21 bp, Artificial Sequence
  Description of Artificial Sequence: Synthetic oligonucleotide
atgaacagaatcgtcatgagc

SEQ ID NO: 34975 - DNA, 21 bp, Artificial Sequence
  Description of Artificial Sequence: Synthetic oligonucleotide
atgaacagcggatgcgaagac

SEQ ID NO: 34976 - DNA, 21 bp, Artificial Sequence
  Description of Artificial Sequence: Synthetic oligonucleotide
atgaacagcggaatgccattc

SEQ ID NO: 34977 - DNA, 21 bp, Artificial Sequence
  Description of Artificial Sequence: Synthetic oligonucleotide
atgaacagcaaaggagaacca

SEQ ID NO: 34978 - DNA, 21 bp, Artificial Sequence
  Description of Artificial Sequence: Synthetic oligonucleotide
atgaacagcaaaatgtaccca

SEQ ID NO: 34979 - DNA, 21 bp, Artificial Sequence
  Description of Artificial Sequence: Synthetic oligonucleotide
atgaacagcctcccaagaagc

SEQ ID NO: 34980 - DNA, 21 bp, Artificial Sequence
  Description of Artificial Sequence: Synthetic oligonucleotide
atgaacagcagaaacggatac

SEQ ID NO: 34981 - DNA, 21 bp, Artificial Sequence
  Description of Artificial Sequence: Synthetic oligonucleotide
atgaacagcacactcgcagca

SEQ ID NO: 34982 - DNA, 21 bp, Artificial Sequence
  Description of Artificial Sequence: Synthetic oligonucleotide
atgaacagcacaacaacacca

SEQ ID NO: 34983 - DNA, 21 bp, Artificial Sequence
  Description of Artificial Sequence: Synthetic oligonucleotide
atgaacacaaaaacattccca

SEQ ID NO: 34984 - DNA, 21 bp, Artificial Sequence
  Description of Artificial Sequence: Synthetic oligonucleotide
atgaacacaagcgtcgtctac

SEQ ID NO: 34985 - DNA, 21 bp, Artificial Sequence
  Description of Artificial Sequence: Synthetic oligonucleotide
atgaacgtcgtcggacaaagc

SEQ ID NO: 34986 - DNA, 21 bp, Artificial Sequence
  Description of Artificial Sequence: Synthetic oligonucleotide
atgccagcacacgtcctccca

SEQ ID NO: 34987 - DNA, 21 bp, Artificial Sequence
  Description of Artificial Sequence: Synthetic oligonucleotide
atgccagcaagcagcgtcagc

SEQ ID NO: 34988 - DNA, 21 bp, Artificial Sequence
  Description of Artificial Sequence: Synthetic oligonucleotide
atgccagcaacattcacagac

SEQ ID NO: 34989 - DNA, 21 bp, Artificial Sequence
  Description of Artificial Sequence: Synthetic oligonucleotide
atgccagacgcaaaaatcagc

SEQ ID NO: 34990 - DNA, 21 bp, Artificial Sequence
  Description of Artificial Sequence: Synthetic oligonucleotide
atgccagaccacccactcaga

SEQ ID NO: 34991 - DNA, 21 bp, Artificial Sequence
  Description of Artificial Sequence: Synthetic oligonucleotide
atgccagaaagcatgaacaca

SEQ ID NO: 34992 - DNA, 21 bp, Artificial Sequence
  Description of Artificial Sequence: Synthetic oligonucleotide
atgccattcaacgacaacgtc

SEQ ID NO: 34993 - DNA, 21 bp, Artificial Sequence
  Description of Artificial Sequence: Synthetic oligonucleotide
atgccacacggaagcttcgca

SEQ ID NO: 34994 - DNA, 21 bp, Artificial Sequence
  Description of Artificial Sequence: Synthetic oligonucleotide
atgccacacctcgaaatgaac

SEQ ID NO: 34995 - DNA, 21 bp, Artificial Sequence
  Description of Artificial Sequence: Synthetic oligonucleotide
atgccacacctcatcacaagc

SEQ ID NO: 34996 - DNA, 21 bp, Artificial Sequence
  Description of Artificial Sequence: Synthetic oligonucleotide
atgccacacatgggactcaca

SEQ ID NO: 34997 - DNA, 21 bp, Artificial Sequence
  Description of Artificial Sequence: Synthetic oligonucleotide
atgccaatcagcccactcgca

SEQ ID NO: 34998 - DNA, 21 bp, Artificial Sequence
  Description of Artificial Sequence: Synthetic oligonucleotide
atgccaatcgtcagaatcagc

SEQ ID NO: 34999 - DNA, 21 bp, Artificial Sequence
  Description of Artificial Sequence: Synthetic oligonucleotide
atgccaaaacaagaactcatc

SEQ ID NO: 35000 - DNA, 21 bp, Artificial Sequence
  Description of Artificial Sequence: Synthetic oligonucleotide
atgccactcgacagcgtcgca

SEQ ID NO: 35001 - DNA, 21 bp, Artificial Sequence
  Description of Artificial Sequence: Synthetic oligonucleotide
atgccactcggaggagcatac

SEQ ID NO: 35002 - DNA, 21 bp, Artificial Sequence
  Description of Artificial Sequence: Synthetic oligonucleotide
atgccactcagaaacacaatg

SEQ ID NO: 35003 - DNA, 21 bp, Artificial Sequence
  Description of Artificial Sequence: Synthetic oligonucleotide
atgccactcagcaacagcagc

SEQ ID NO: 35004 - DNA, 21 bp, Artificial Sequence
  Description of Artificial Sequence: Synthetic oligonucleotide
atgccaatgggagacccaatc

SEQ ID NO: 35005 - DNA, 21 bp, Artificial Sequence
  Description of Artificial Sequence: Synthetic oligonucleotide
atgccaatgatgctcagactc

SEQ ID NO: 35006 - DNA, 21 bp, Artificial Sequence
  Description of Artificial Sequence: Synthetic oligonucleotide
atgccaatgaacagaacacca

SEQ ID NO: 35007 - DNA, 21 bp, Artificial Sequence
  Description of Artificial Sequence: Synthetic oligonucleotide
atgccaatgagagcaaacgga

SEQ ID NO: 35008 - DNA, 21 bp, Artificial Sequence
  Description of Artificial Sequence: Synthetic oligonucleotide
atgccaaacgtcccaccaaca

SEQ ID NO: 35009 - DNA, 21 bp, Artificial Sequence
  Description of Artificial Sequence: Synthetic oligonucleotide
atgccaccagcactcctcaca

SEQ ID NO: 35010 - DNA, 21 bp, Artificial Sequence
  Description of Artificial Sequence: Synthetic oligonucleotide
atgccaccagaagtcccagtc

SEQ ID NO: 35011 - DNA, 21 bp, Artificial Sequence
  Description of Artificial Sequence: Synthetic oligonucleotide
atgccaccaccaaacctcaac

SEQ ID NO: 35012 - DNA, 21 bp, Artificial Sequence
  Description of Artificial Sequence: Synthetic oligonucleotide
atgccaccacaaaacgcaatg

SEQ ID NO: 35013 - DNA, 21 bp, Artificial Sequence
  Description of Artificial Sequence: Synthetic oligonucleotide
atgccaccaagcaacagacca

SEQ ID NO: 35014 - DNA, 21 bp, Artificial Sequence
  Description of Artificial Sequence: Synthetic oligonucleotide
atgccaccaagcacatacgca

SEQ ID NO: 35015 - DNA, 21 bp, Artificial Sequence
  Description of Artificial Sequence: Synthetic oligonucleotide
atgccacaactccacgaaaca

SEQ ID NO: 35016 - DNA, 21 bp, Artificial Sequence
  Description of Artificial Sequence: Synthetic oligonucleotide
atgccacaaagcagagacgaa

SEQ ID NO: 35017 - DNA, 21 bp, Artificial Sequence
  Description of Artificial Sequence: Synthetic oligonucleotide
atgccaagagacgcatacgga

SEQ ID NO: 35018 - DNA, 21 bp, Artificial Sequence
  Description of Artificial Sequence: Synthetic oligonucleotide
atgccaagaggagaaatccca

SEQ ID NO: 35019 - DNA, 21 bp, Artificial Sequence
  Description of Artificial Sequence: Synthetic oligonucleotide
atgccaagaaacggaccacca

SEQ ID NO: 35020 - DNA, 21 bp, Artificial Sequence
  Description of Artificial Sequence: Synthetic oligonucleotide
atgccaagagtcgcaagcaac

SEQ ID NO: 35021 - DNA, 21 bp, Artificial Sequence
  Description of Artificial Sequence: Synthetic oligonucleotide
atgccaagcgcaagcgaagtc

SEQ ID NO: 35022 - DNA, 21 bp, Artificial Sequence
  Description of Artificial Sequence: Synthetic oligonucleotide
atgccaagcggaagagtccac

SEQ ID NO: 35023 - DNA, 21 bp, Artificial Sequence
  Description of Artificial Sequence: Synthetic oligonucleotide
atgccaagcggaagagtccca

SEQ ID NO: 35024 - DNA, 21 bp, Artificial Sequence
  Description of Artificial Sequence: Synthetic oligonucleotide
atgccaagcatcagcctccca

SEQ ID NO: 35025 - DNA, 21 bp, Artificial Sequence
  Description of Artificial Sequence: Synthetic oligonucleotide
atgccaagcaacagcatcagc

SEQ ID NO: 35026 - DNA, 21 bp, Artificial Sequence
  Description of Artificial Sequence: Synthetic oligonucleotide
atgccaagcccagaagtctac

SEQ ID NO: 35027 - DNA, 21 bp, Artificial Sequence
  Description of Artificial Sequence: Synthetic oligonucleotide
atgccaacagacccaaaaatg

SEQ ID NO: 35028 - DNA, 21 bp, Artificial Sequence
  Description of Artificial Sequence: Synthetic oligonucleotide
atgccaacaggaacagacctc

SEQ ID NO: 35029 - DNA, 21 bp, Artificial Sequence
  Description of Artificial Sequence: Synthetic oligonucleotide
atgccaacaccaagaacagga

SEQ ID NO: 35030 - DNA, 21 bp, Artificial Sequence
  Description of Artificial Sequence: Synthetic oligonucleotide
atgccaacaagcggaccacca

SEQ ID NO: 35031 - DNA, 21 bp, Artificial Sequence
  Description of Artificial Sequence: Synthetic oligonucleotide
atgccaacatacgacaaaaga

SEQ ID NO: 35032 - DNA, 21 bp, Artificial Sequence
  Description of Artificial Sequence: Synthetic oligonucleotide
atgccagtcccagaaagacca

SEQ ID NO: 35033 - DNA, 21 bp, Artificial Sequence
  Description of Artificial Sequence: Synthetic oligonucleotide
atgccagtcagcggacacgtc

SEQ ID NO: 35034 - DNA, 21 bp, Artificial Sequence
  Description of Artificial Sequence: Synthetic oligonucleotide
atgccagtcagcagactcgaa

SEQ ID NO: 35035 - DNA, 21 bp, Artificial Sequence
  Description of Artificial Sequence: Synthetic oligonucleotide
atgccagtcagcagcacaaga

SEQ ID NO: 35036 - DNA, 21 bp, Artificial Sequence
  Description of Artificial Sequence: Synthetic oligonucleotide
atgccatggaaagacgcagca

SEQ ID NO: 35037 - DNA, 21 bp, Artificial Sequence
  Description of Artificial Sequence: Synthetic oligonucleotide
atgcaagcagcaagcagccca

SEQ ID NO: 35038 - DNA, 21 bp, Artificial Sequence
  Description of Artificial Sequence: Synthetic oligonucleotide
atgcaagcaggaagcatgaga

SEQ ID NO: 35039 - DNA, 21 bp, Artificial Sequence
  Description of Artificial Sequence: Synthetic oligonucleotide
atgcaagcaagccacagccca

SEQ ID NO: 35040 - DNA, 21 bp, Artificial Sequence
  Description of Artificial Sequence: Synthetic oligonucleotide
atgcaagacggatacacaaac

SEQ ID NO: 35041 - DNA, 21 bp, Artificial Sequence
  Description of Artificial Sequence: Synthetic oligonucleotide
atgcaaggaaaactcctcgca

SEQ ID NO: 35042 - DNA, 21 bp, Artificial Sequence
  Description of Artificial Sequence: Synthetic oligonucleotide
atgcaacacggagcacaccca

SEQ ID NO: 35043 - DNA, 21 bp, Artificial Sequence
  Description of Artificial Sequence: Synthetic oligonucleotide
atgcaactcgaacacagccca

SEQ ID NO: 35044 - DNA, 21 bp, Artificial Sequence
  Description of Artificial Sequence: Synthetic oligonucleotide
atgcaactcggaaacgtcagc

SEQ ID NO: 35045 - DNA, 21 bp, Artificial Sequence
  Description of Artificial Sequence: Synthetic oligonucleotide
atgcaactcggaccagtcatg

SEQ ID NO: 35046 - DNA, 21 bp, Artificial Sequence
  Description of Artificial Sequence: Synthetic oligonucleotide
atgcaaaacatgccaccacca

SEQ ID NO: 35047 - DNA, 21 bp, Artificial Sequence
  Description of Artificial Sequence: Synthetic oligonucleotide
atgcaaccaaacacaagcttc

SEQ ID NO: 35048 - DNA, 21 bp, Artificial Sequence
  Description of Artificial Sequence: Synthetic oligonucleotide
atgcaaagaagactcgacatc

SEQ ID NO: 35049 - DNA, 21 bp, Artificial Sequence
  Description of Artificial Sequence: Synthetic oligonucleotide
atgcaaagaacaacacacgtc

SEQ ID NO: 35050 - DNA, 21 bp, Artificial Sequence
  Description of Artificial Sequence: Synthetic oligonucleotide
atgcaaagcagagtcccactc

SEQ ID NO: 35051 - DNA, 21 bp, Artificial Sequence
  Description of Artificial Sequence: Synthetic oligonucleotide
atgcaaagcagcccagacgga

SEQ ID NO: 35052 - DNA, 21 bp, Artificial Sequence
  Description of Artificial Sequence: Synthetic oligonucleotide
atgcaaacagcaacacaagga

SEQ ID NO: 35053 - DNA, 21 bp, Artificial Sequence
  Description of Artificial Sequence: Synthetic oligonucleotide
atgcaaacacaaagcctccca

SEQ ID NO: 35054 - DNA, 21 bp, Artificial Sequence
  Description of Artificial Sequence: Synthetic oligonucleotide
atgcaagtcagcgaaagacca

SEQ ID NO: 35055 - DNA, 21 bp, Artificial Sequence
  Description of Artificial Sequence: Synthetic oligonucleotide
atgcaagtcagcggaccacca

SEQ ID NO: 35056 - DNA, 21 bp, Artificial Sequence
  Description of Artificial Sequence: Synthetic oligonucleotide
atgcaagtcacagaaggactc

SEQ ID NO: 35057 - DNA, 21 bp, Artificial Sequence
  Description of Artificial Sequence: Synthetic oligonucleotide
atgagagcaggagcagcagga

SEQ ID NO: 35058 - DNA, 21 bp, Artificial Sequence
  Description of Artificial Sequence: Synthetic oligonucleotide
atgagagcaagcgcaggaatg

SEQ ID NO: 35059 - DNA, 21 bp, Artificial Sequence
  Description of Artificial Sequence: Synthetic oligonucleotide
atgagagacgacgcagcagtc

SEQ ID NO: 35060 - DNA, 21 bp, Artificial Sequence
  Description of Artificial Sequence: Synthetic oligonucleotide
atgagagacggaccaccaaac

SEQ ID NO: 35061 - DNA, 21 bp, Artificial Sequence
  Description of Artificial Sequence: Synthetic oligonucleotide
atgagagaaagaagcagcgca

SEQ ID NO: 35062 - DNA, 21 bp, Artificial Sequence
  Description of Artificial Sequence: Synthetic oligonucleotide
atgagaggagacagcgcacca

SEQ ID NO: 35063 - DNA, 21 bp, Artificial Sequence
  Description of Artificial Sequence: Synthetic oligonucleotide
atgagaggattcgacgaactc

SEQ ID NO: 35064 - DNA, 21 bp, Artificial Sequence
  Description of Artificial Sequence: Synthetic oligonucleotide
atgagaggaacaccagtcgga

SEQ ID NO: 35065 - DNA, 21 bp, Artificial Sequence
  Description of Artificial Sequence: Synthetic oligonucleotide
atgagacacggaaacccagca

SEQ ID NO: 35066 - DNA, 21 bp, Artificial Sequence
  Description of Artificial Sequence: Synthetic oligonucleotide
atgagacacgtcaacacacca

SEQ ID NO: 35067 - DNA, 21 bp, Artificial Sequence
  Description of Artificial Sequence: Synthetic oligonucleotide
atgagaatcggagacagacac

SEQ ID NO: 35068 - DNA, 21 bp, Artificial Sequence
  Description of Artificial Sequence: Synthetic oligonucleotide
atgagactcagcacaccagaa

SEQ ID NO: 35069 - DNA, 21 bp, Artificial Sequence
  Description of Artificial Sequence: Synthetic oligonucleotide
atgagactcgtcagcgcagaa

SEQ ID NO: 35070 - DNA, 21 bp, Artificial Sequence
  Description of Artificial Sequence: Synthetic oligonucleotide
atgagaatggcagtcagcgca

SEQ ID NO: 35071 - DNA, 21 bp, Artificial Sequence
  Description of Artificial Sequence: Synthetic oligonucleotide
atgagaatgggaggagtccca

SEQ ID NO: 35072 - DNA, 21 bp, Artificial Sequence
  Description of Artificial Sequence: Synthetic oligonucleotide
atgagaaacgcagcaaaaaga

SEQ ID NO: 35073 - DNA, 21 bp, Artificial Sequence
  Description of Artificial Sequence: Synthetic oligonucleotide
atgagaaacagcgtctaccca

SEQ ID NO: 35074 - DNA, 21 bp, Artificial Sequence
  Description of Artificial Sequence: Synthetic oligonucleotide
atgagaaacacaacattcgaa

SEQ ID NO: 35075 - DNA, 21 bp, Artificial Sequence
  Description of Artificial Sequence: Synthetic oligonucleotide
atgagaccagcaaacgaaagc

SEQ ID NO: 35076 - DNA, 21 bp, Artificial Sequence
  Description of Artificial Sequence: Synthetic oligonucleotide
atgagaccagcagtcggagtc

SEQ ID NO: 35077 - DNA, 21 bp, Artificial Sequence
  Description of Artificial Sequence: Synthetic oligonucleotide
atgagaccaggactcgaagga

SEQ ID NO: 35078 - DNA, 21 bp, Artificial Sequence
  Description of Artificial Sequence: Synthetic oligonucleotide
atgagaccaacacacgcatgc

SEQ ID NO: 35079 - DNA, 21 bp, Artificial Sequence
  Description of Artificial Sequence: Synthetic oligonucleotide
atgagaccaacaaacgcaaca

SEQ ID NO: 35080 - DNA, 21 bp, Artificial Sequence
  Description of Artificial Sequence: Synthetic oligonucleotide
atgagacaaatcggataccac

SEQ ID NO: 35081 - DNA, 21 bp, Artificial Sequence
  Description of Artificial Sequence: Synthetic oligonucleotide
atgagacaagtcggaagagaa

SEQ ID NO: 35082 - DNA, 21 bp, Artificial Sequence
  Description of Artificial Sequence: Synthetic oligonucleotide
atgagaagcttcagctacgaa

SEQ ID NO: 35083 - DNA, 21 bp, Artificial Sequence
  Description of Artificial Sequence: Synthetic oligonucleotide
atgagaagcaacgacgtcgtc

SEQ ID NO: 35084 - DNA, 21 bp, Artificial Sequence
  Description of Artificial Sequence: Synthetic oligonucleotide
atgagaagcccaccactctac

SEQ ID NO: 35085 - DNA, 21 bp, Artificial Sequence
  Description of Artificial Sequence: Synthetic oligonucleotide
atgagaagccaaagcttcagc

SEQ ID NO: 35086 - DNA, 21 bp, Artificial Sequence
  Description of Artificial Sequence: Synthetic oligonucleotide
atgagaagcagagtcgacaca

SEQ ID NO: 35087 - DNA, 21 bp, Artificial Sequence
  Description of Artificial Sequence: Synthetic oligonucleotide
atgagaagcgtcatcgcacaa

SEQ ID NO: 35088 - DNA, 21 bp, Artificial Sequence
  Description of Artificial Sequence: Synthetic oligonucleotide
atgagaacagaaagcacactc

SEQ ID NO: 35089 - DNA, 21 bp, Artificial Sequence
  Description of Artificial Sequence: Synthetic oligonucleotide
atgagaacaaacagcagcaca

SEQ ID NO: 35090 - DNA, 21 bp, Artificial Sequence
  Description of Artificial Sequence: Synthetic oligonucleotide
atgagaacaagcaacacagca

SEQ ID NO: 35091 - DNA, 21 bp, Artificial Sequence
  Description of Artificial Sequence: Synthetic oligonucleotide
atgagagtcaacacagaccca

SEQ ID NO: 35092 - DNA, 21 bp, Artificial Sequence
  Description of Artificial Sequence: Synthetic oligonucleotide
atgagagtcagcacagcagca

SEQ ID NO: 35093 - DNA, 21 bp, Artificial Sequence
  Description of Artificial Sequence: Synthetic oligonucleotide
atgagatacgcaccaggaaca

SEQ ID NO: 35094 - DNA, 21 bp, Artificial Sequence
  Description of Artificial Sequence: Synthetic oligonucleotide
atgagcgcagacagattcagc

SEQ ID NO: 35095 - DNA, 21 bp, Artificial Sequence
  Description of Artificial Sequence: Synthetic oligonucleotide
atgagcgcaaaaacatacctc

SEQ ID NO: 35096 - DNA, 21 bp, Artificial Sequence
  Description of Artificial Sequence: Synthetic oligonucleotide
atgagcgcaagcatcggaagc

SEQ ID NO: 35097 - DNA, 21 bp, Artificial Sequence
  Description of Artificial Sequence: Synthetic oligonucleotide
atgagcgcagtcctcccacac

SEQ ID NO: 35098 - DNA, 21 bp, Artificial Sequence
  Description of Artificial Sequence: Synthetic oligonucleotide
atgagcgaccaactcagattc

SEQ ID NO: 35099 - DNA, 21 bp, Artificial Sequence
  Description of Artificial Sequence: Synthetic oligonucleotide
atgagcgacagccacagcaga

SEQ ID NO: 35100 - DNA, 21 bp, Artificial Sequence
  Description of Artificial Sequence: Synthetic oligonucleotide
atgagcgactggaacggaatc

SEQ ID NO: 35101 - DNA, 21 bp, Artificial Sequence
  Description of Artificial Sequence: Synthetic oligonucleotide
atgagcgaaatgagcacacac

SEQ ID NO: 35102 - DNA, 21 bp, Artificial Sequence
  Description of Artificial Sequence: Synthetic oligonucleotide
atgagcggaggaagcagctac

SEQ ID NO: 35103 - DNA, 21 bp, Artificial Sequence
  Description of Artificial Sequence: Synthetic oligonucleotide
atgagcggaaaccacgcaaca

SEQ ID NO: 35104 - DNA, 21 bp, Artificial Sequence
  Description of Artificial Sequence: Synthetic oligonucleotide
atgagcggaccacaactcagc

SEQ ID NO: 35105 - DNA, 21 bp, Artificial Sequence
  Description of Artificial Sequence: Synthetic oligonucleotide
atgagcggaagaggacaaatc

SEQ ID NO: 35106 - DNA, 21 bp, Artificial Sequence
  Description of Artificial Sequence: Synthetic oligonucleotide
atgagccaccacagcacaaca

SEQ ID NO: 35107 - DNA, 21 bp, Artificial Sequence
  Description of Artificial Sequence: Synthetic oligonucleotide
atgagccacccatacaaacca

SEQ ID NO: 35108 - DNA, 21 bp, Artificial Sequence
  Description of Artificial Sequence: Synthetic oligonucleotide
atgagccactacctcaaagca

SEQ ID NO: 35109 - DNA, 21 bp, Artificial Sequence
  Description of Artificial Sequence: Synthetic oligonucleotide
atgagcatcgacgaagcagaa

SEQ ID NO: 35110 - DNA, 21 bp, Artificial Sequence
  Description of Artificial Sequence: Synthetic oligonucleotide
atgagcatcggaacaagcgaa

SEQ ID NO: 35111 - DNA, 21 bp, Artificial Sequence
  Description of Artificial Sequence: Synthetic oligonucleotide
atgagcatcatcggaggagtc

SEQ ID NO: 35112 - DNA, 21 bp, Artificial Sequence
  Description of Artificial Sequence: Synthetic oligonucleotide
atgagcatcagccacacaaca

SEQ ID NO: 35113 - DNA, 21 bp, Artificial Sequence
  Description of Artificial Sequence: Synthetic oligonucleotide
atgagcatcacacaccacagc

SEQ ID NO: 35114 - DNA, 21 bp, Artificial Sequence
  Description of Artificial Sequence: Synthetic oligonucleotide
atgagcaaaatctggccaagc

SEQ ID NO: 35115 - DNA, 21 bp, Artificial Sequence
  Description of Artificial Sequence: Synthetic oligonucleotide
atgagcaaaaacctcagcgca

SEQ ID NO: 35116 - DNA, 21 bp, Artificial Sequence
  Description of Artificial Sequence: Synthetic oligonucleotide
atgagcaaaagaacagacagc

SEQ ID NO: 35117 - DNA, 21 bp, Artificial Sequence
  Description of Artificial Sequence: Synthetic oligonucleotide
atgagcaaaacaatcgcacaa

SEQ ID NO: 35118 - DNA, 21 bp, Artificial Sequence
  Description of Artificial Sequence: Synthetic oligonucleotide
atgagcaaagtcccattcaac

SEQ ID NO: 35119 - DNA, 21 bp, Artificial Sequence
  Description of Artificial Sequence: Synthetic oligonucleotide
atgagcctcgcaaacaaaagc

SEQ ID NO: 35120 - DNA, 21 bp, Artificial Sequence
  Description of Artificial Sequence: Synthetic oligonucleotide
atgagcctcaaactcagcgga

SEQ ID NO: 35121 - DNA, 21 bp, Artificial Sequence
  Description of Artificial Sequence: Synthetic oligonucleotide
atgagcctcccaagcacacaa

SEQ ID NO: 35122 - DNA, 21 bp, Artificial Sequence
  Description of Artificial Sequence: Synthetic oligonucleotide
atgagcctcacagtcacagca

SEQ ID NO: 35123 - DNA, 21 bp, Artificial Sequence
  Description of Artificial Sequence: Synthetic oligonucleotide
atgagcatgcacggaggaagc

SEQ ID NO: 35124 - DNA, 21 bp, Artificial Sequence
  Description of Artificial Sequence: Synthetic oligonucleotide
atgagcaacggatggcaagac

SEQ ID NO: 35125 - DNA, 21 bp, Artificial Sequence
  Description of Artificial Sequence: Synthetic oligonucleotide
atgagcaacatcggactcgga

SEQ ID NO: 35126 - DNA, 21 bp, Artificial Sequence
  Description of Artificial Sequence: Synthetic oligonucleotide
atgagcaacaaccacggactc

SEQ ID NO: 35127 - DNA, 21 bp, Artificial Sequence
  Description of Artificial Sequence: Synthetic oligonucleotide
atgagcaacagcgaattcgga

SEQ ID NO: 35128 - DNA, 21 bp, Artificial Sequence
  Description of Artificial Sequence: Synthetic oligonucleotide
atgagcccagcaatgcaaaca

SEQ ID NO: 35129 - DNA, 21 bp, Artificial Sequence
  Description of Artificial Sequence: Synthetic oligonucleotide
atgagcccagaccaaagatac

SEQ ID NO: 35130 - DNA, 21 bp, Artificial Sequence
  Description of Artificial Sequence: Synthetic oligonucleotide
atgagcccaggagtcaacgca

SEQ ID NO: 35131 - DNA, 21 bp, Artificial Sequence
  Description of Artificial Sequence: Synthetic oligonucleotide
atgagcccacacttcaacaca

SEQ ID NO: 35132 - DNA, 21 bp, Artificial Sequence
  Description of Artificial Sequence: Synthetic oligonucleotide
atgagcccaatggtcacagca

SEQ ID NO: 35133 - DNA, 21 bp, Artificial Sequence
  Description of Artificial Sequence: Synthetic oligonucleotide
atgagcccaagcgacttcgga

SEQ ID NO: 35134 - DNA, 21 bp, Artificial Sequence
  Description of Artificial Sequence: Synthetic oligonucleotide
atgagcccaagcagcccaatg

SEQ ID NO: 35135 - DNA, 21 bp, Artificial Sequence
  Description of Artificial Sequence: Synthetic oligonucleotide
atgagccaacaaagcagcgga

SEQ ID NO: 35136 - DNA, 21 bp, Artificial Sequence
  Description of Artificial Sequence: Synthetic oligonucleotide
atgagccaaagaagagaccca

SEQ ID NO: 35137 - DNA, 21 bp, Artificial Sequence
  Description of Artificial Sequence: Synthetic oligonucleotide
atgagcagagacgtcagccac

SEQ ID NO: 35138 - DNA, 21 bp, Artificial Sequence
  Description of Artificial Sequence: Synthetic oligonucleotide
atgagcagagaaagcggagga

SEQ ID NO: 35139 - DNA, 21 bp, Artificial Sequence
  Description of Artificial Sequence: Synthetic oligonucleotide
atgagcagactcgacagccca

SEQ ID NO: 35140 - DNA, 21 bp, Artificial Sequence
  Description of Artificial Sequence: Synthetic oligonucleotide
atgagcagactcggagcaaca

SEQ ID NO: 35141 - DNA, 21 bp, Artificial Sequence
  Description of Artificial Sequence: Synthetic oligonucleotide
atgagcagaaacctctgctgc

SEQ ID NO: 35142 - DNA, 21 bp, Artificial Sequence
  Description of Artificial Sequence: Synthetic oligonucleotide
atgagcagcgcaagcagccca

SEQ ID NO: 35143 - DNA, 21 bp, Artificial Sequence
  Description of Artificial Sequence: Synthetic oligonucleotide
atgagcagcgaaccagtcaaa

SEQ ID NO: 35144 - DNA, 21 bp, Artificial Sequence
  Description of Artificial Sequence: Synthetic oligonucleotide
atgagcagccacggagtcgca

SEQ ID NO: 35145 - DNA, 21 bp, Artificial Sequence
  Description of Artificial Sequence: Synthetic oligonucleotide
atgagcagcctcaacagcctc

SEQ ID NO: 35146 - DNA, 21 bp, Artificial Sequence
  Description of Artificial Sequence: Synthetic oligonucleotide
atgagcagcctcaacgtccac

SEQ ID NO: 35147 - DNA, 21 bp, Artificial Sequence
  Description of Artificial Sequence: Synthetic oligonucleotide
atgagcagcctcagacaagca

SEQ ID NO: 35148 - DNA, 21 bp, Artificial Sequence
  Description of Artificial Sequence: Synthetic oligonucleotide
atgagcagcccacaactcagc

SEQ ID NO: 35149 - DNA, 21 bp, Artificial Sequence
  Description of Artificial Sequence: Synthetic oligonucleotide
atgagcagccaaacaagcaaa

SEQ ID NO: 35150 - DNA, 21 bp, Artificial Sequence
  Description of Artificial Sequence: Synthetic oligonucleotide
atgagcagcagatgggcagca

SEQ ID NO: 35151 - DNA, 21 bp, Artificial Sequence
  Description of Artificial Sequence: Synthetic oligonucleotide
atgagcagcagcgtccacaca

SEQ ID NO: 35152 - DNA, 21 bp, Artificial Sequence
  Description of Artificial Sequence: Synthetic oligonucleotide
atgagcagcacaagaacagac

SEQ ID NO: 35153 - DNA, 21 bp, Artificial Sequence
  Description of Artificial Sequence: Synthetic oligonucleotide
atgagcagcacaagctacagc

SEQ ID NO: 35154 - DNA, 21 bp, Artificial Sequence
  Description of Artificial Sequence: Synthetic oligonucleotide
atgagcacagaagaccacgca

SEQ ID NO: 35155 - DNA, 21 bp, Artificial Sequence
  Description of Artificial Sequence: Synthetic oligonucleotide
atgagcacagaaagaaacgca

SEQ ID NO: 35156 - DNA, 21 bp, Artificial Sequence
  Description of Artificial Sequence: Synthetic oligonucleotide
atgagcacattcccaccacca

SEQ ID NO: 35157 - DNA, 21 bp, Artificial Sequence
  Description of Artificial Sequence: Synthetic oligonucleotide
atgagcacaggaagactcatc

SEQ ID NO: 35158 - DNA, 21 bp, Artificial Sequence
  Description of Artificial Sequence: Synthetic oligonucleotide
atgagcacacacgtcgtcagc

SEQ ID NO: 35159 - DNA, 21 bp, Artificial Sequence
  Description of Artificial Sequence: Synthetic oligonucleotide
atgagcacactcccacacgca

SEQ ID NO: 35160 - DNA, 21 bp, Artificial Sequence
  Description of Artificial Sequence: Synthetic oligonucleotide
atgagcacaatgcaaagaagc

SEQ ID NO: 35161 - DNA, 21 bp, Artificial Sequence
  Description of Artificial Sequence: Synthetic oligonucleotide
atgagcacaaacttcaaagga

SEQ ID NO: 35162 - DNA, 21 bp, Artificial Sequence
  Description of Artificial Sequence: Synthetic oligonucleotide
atgagcacaaacacacacctc

SEQ ID NO: 35163 - DNA, 21 bp, Artificial Sequence
  Description of Artificial Sequence: Synthetic oligonucleotide
atgagcacaagaatcgcaaac

SEQ ID NO: 35164 - DNA, 21 bp, Artificial Sequence
  Description of Artificial Sequence: Synthetic oligonucleotide
atgagcacaagaccaatgcca

SEQ ID NO: 35165 - DNA, 21 bp, Artificial Sequence
  Description of Artificial Sequence: Synthetic oligonucleotide
atgagcacaagaagcccaagc

SEQ ID NO: 35166 - DNA, 21 bp, Artificial Sequence
  Description of Artificial Sequence: Synthetic oligonucleotide
atgagcgtcccacacggagac

SEQ ID NO: 35167 - DNA, 21 bp, Artificial Sequence
  Description of Artificial Sequence: Synthetic oligonucleotide
atgagctacccataccaaaac

SEQ ID NO: 35168 - DNA, 21 bp, Artificial Sequence
  Description of Artificial Sequence: Synthetic oligonucleotide
atgagctaccaaaaaccaagc

SEQ ID NO: 35169 - DNA, 21 bp, Artificial Sequence
  Description of Artificial Sequence: Synthetic oligonucleotide
atgagctacacaagcgacagc

SEQ ID NO: 35170 - DNA, 21 bp, Artificial Sequence
  Description of Artificial Sequence: Synthetic oligonucleotide
atgacagcaaacacagcactc

SEQ ID NO: 35171 - DNA, 21 bp, Artificial Sequence
  Description of Artificial Sequence: Synthetic oligonucleotide
atgacagacatcacaggaaga

SEQ ID NO: 35172 - DNA, 21 bp, Artificial Sequence
  Description of Artificial Sequence: Synthetic oligonucleotide
atgacagacagccaaccagga

SEQ ID NO: 35173 - DNA, 21 bp, Artificial Sequence
  Description of Artificial Sequence: Synthetic oligonucleotide
atgacagacacaagaagactc

SEQ ID NO: 35174 - DNA, 21 bp, Artificial Sequence
  Description of Artificial Sequence: Synthetic oligonucleotide
atgacagacgtcggagtcaga

SEQ ID NO: 35175 - DNA, 21 bp, Artificial Sequence
  Description of Artificial Sequence: Synthetic oligonucleotide
atgacagactacagcaaagga

SEQ ID NO: 35176 - DNA, 21 bp, Artificial Sequence
  Description of Artificial Sequence: Synthetic oligonucleotide
atgacagaaccaatggtcgac

SEQ ID NO: 35177 - DNA, 21 bp, Artificial Sequence
  Description of Artificial Sequence: Synthetic oligonucleotide
atgacagaaagcctcacagca

SEQ ID NO: 35178 - DNA, 21 bp, Artificial Sequence
  Description of Artificial Sequence: Synthetic oligonucleotide
atgacagaagtcacaacattc

SEQ ID NO: 35179 - DNA, 21 bp, Artificial Sequence
  Description of Artificial Sequence: Synthetic oligonucleotide
atgacattcccaaaactcaac

SEQ ID NO: 35180 - DNA, 21 bp, Artificial Sequence
  Description of Artificial Sequence: Synthetic oligonucleotide
atgacaggaatgacaagcgca

SEQ ID NO: 35181 - DNA, 21 bp, Artificial Sequence
  Description of Artificial Sequence: Synthetic oligonucleotide
atgacaggaaaccacagaatc

SEQ ID NO: 35182 - DNA, 21 bp, Artificial Sequence
  Description of Artificial Sequence: Synthetic oligonucleotide
atgacaggaacaagccaacca

SEQ ID NO: 35183 - DNA, 21 bp, Artificial Sequence
  Description of Artificial Sequence: Synthetic oligonucleotide
atgacacacccaccaagcgac

SEQ ID NO: 35184 - DNA, 21 bp, Artificial Sequence
  Description of Artificial Sequence: Synthetic oligonucleotide
atgacacacacaggaacactc

SEQ ID NO: 35185 - DNA, 21 bp, Artificial Sequence
  Description of Artificial Sequence: Synthetic oligonucleotide
atgacaaaaccacacatcgtc

SEQ ID NO: 35186 - DNA, 21 bp, Artificial Sequence
  Description of Artificial Sequence: Synthetic oligonucleotide
atgacactcggaagcgtcgtc

SEQ ID NO: 35187 - DNA, 21 bp, Artificial Sequence
  Description of Artificial Sequence: Synthetic oligonucleotide
atgacactccaccaacaattc

SEQ ID NO: 35188 - DNA, 21 bp, Artificial Sequence
  Description of Artificial Sequence: Synthetic oligonucleotide
atgacactcagcacaggagca

SEQ ID NO: 35189 - DNA, 21 bp, Artificial Sequence
  Description of Artificial Sequence: Synthetic oligonucleotide
atgacactcgtcgcaagccca

SEQ ID NO: 35190 - DNA, 21 bp, Artificial Sequence
  Description of Artificial Sequence: Synthetic oligonucleotide
atgacaatggaagcagcaaaa

SEQ ID NO: 35191 - DNA, 21 bp, Artificial Sequence
  Description of Artificial Sequence: Synthetic oligonucleotide
atgacaatgggagaattcaaa

SEQ ID NO: 35192 - DNA, 21 bp, Artificial Sequence
  Description of Artificial Sequence: Synthetic oligonucleotide
atgacaatgacacacagagga

SEQ ID NO: 35193 - DNA, 21 bp, Artificial Sequence
  Description of Artificial Sequence: Synthetic oligonucleotide
atgacaaacgcagtcgtcgac

SEQ ID NO: 35194 - DNA, 21 bp, Artificial Sequence
  Description of Artificial Sequence: Synthetic oligonucleotide
atgacaaacggacacggaatg

SEQ ID NO: 35195 - DNA, 21 bp, Artificial Sequence
  Description of Artificial Sequence: Synthetic oligonucleotide
atgacaaacctccaaagcctc

SEQ ID NO: 35196 - DNA, 21 bp, Artificial Sequence
  Description of Artificial Sequence: Synthetic oligonucleotide
atgacaaacagagcaacagca

SEQ ID NO: 35197 - DNA, 21 bp, Artificial Sequence
  Description of Artificial Sequence: Synthetic oligonucleotide
atgacaccacacaacagcaga

SEQ ID NO: 35198 - DNA, 21 bp, Artificial Sequence
  Description of Artificial Sequence: Synthetic oligonucleotide
atgacaccaccacacggagca

SEQ ID NO: 35199 - DNA, 21 bp, Artificial Sequence
  Description of Artificial Sequence: Synthetic oligonucleotide
atgacaccaacaagctacaac

SEQ ID NO: 35200 - DNA, 21 bp, Artificial Sequence
  Description of Artificial Sequence: Synthetic oligonucleotide
atgacacaaacagacgtcaca

SEQ ID NO: 35201 - DNA, 21 bp, Artificial Sequence
  Description of Artificial Sequence: Synthetic oligonucleotide
atgacaagaagcgaatggagc

SEQ ID NO: 35202 - DNA, 21 bp, Artificial Sequence
  Description of Artificial Sequence: Synthetic oligonucleotide
atgacaagcctcgcagcactc

SEQ ID NO: 35203 - DNA, 21 bp, Artificial Sequence
  Description of Artificial Sequence: Synthetic oligonucleotide
atgacaagcaacacaagaatg

SEQ ID NO: 35204 - DNA, 21 bp, Artificial Sequence
  Description of Artificial Sequence: Synthetic oligonucleotide
atgacaagcgtcagaatgagc

SEQ ID NO: 35205 - DNA, 21 bp, Artificial Sequence
  Description of Artificial Sequence: Synthetic oligonucleotide
atgacaacaggaatcgacagc

SEQ ID NO: 35206 - DNA, 21 bp, Artificial Sequence
  Description of Artificial Sequence: Synthetic oligonucleotide
atgacaacaagcccattcgca

SEQ ID NO: 35207 - DNA, 21 bp, Artificial Sequence
  Description of Artificial Sequence: Synthetic oligonucleotide
atgacaacaagcagcgacctc

SEQ ID NO: 35208 - DNA, 21 bp, Artificial Sequence
  Description of Artificial Sequence: Synthetic oligonucleotide
atgacagtcggagacagcgca

SEQ ID NO: 35209 - DNA, 21 bp, Artificial Sequence
  Description of Artificial Sequence: Synthetic oligonucleotide
atgacagtcggaatcccagca

SEQ ID NO: 35210 - DNA, 21 bp, Artificial Sequence
  Description of Artificial Sequence: Synthetic oligonucleotide
atgacagtcagcaacaaatac

SEQ ID NO: 35211 - DNA, 21 bp, Artificial Sequence
  Description of Artificial Sequence: Synthetic oligonucleotide
atgacagtcagcccaggaaca

SEQ ID NO: 35212 - DNA, 21 bp, Artificial Sequence
  Description of Artificial Sequence: Synthetic oligonucleotide
atggtcgcaagcgacaacagc

SEQ ID NO: 35213 - DNA, 21 bp, Artificial Sequence
  Description of Artificial Sequence: Synthetic oligonucleotide
atggtcgacagagtcctcgac

SEQ ID NO: 35214 - DNA, 21 bp, Artificial Sequence
  Description of Artificial Sequence: Synthetic oligonucleotide
atggtcgaactcacatgggaa

SEQ ID NO: 35215 - DNA, 21 bp, Artificial Sequence
  Description of Artificial Sequence: Synthetic oligonucleotide
atggtcggattcggagcagca

SEQ ID NO: 35216 - DNA, 21 bp, Artificial Sequence
  Description of Artificial Sequence: Synthetic oligonucleotide
atggtcggacaagtcaaaaac

SEQ ID NO: 35217 - DNA, 21 bp, Artificial Sequence
  Description of Artificial Sequence: Synthetic oligonucleotide
atggtcggaagaccaatcgtc

SEQ ID NO: 35218 - DNA, 21 bp, Artificial Sequence
  Description of Artificial Sequence: Synthetic oligonucleotide
atggtcggaagaacaggagga

SEQ ID NO: 35219 - DNA, 21 bp, Artificial Sequence
  Description of Artificial Sequence: Synthetic oligonucleotide
atggtcggaagagtcccaagc

SEQ ID NO: 35220 - DNA, 21 bp, Artificial Sequence
  Description of Artificial Sequence: Synthetic oligonucleotide
atggtccacagcagcgcacac

SEQ ID NO: 35221 - DNA, 21 bp, Artificial Sequence
  Description of Artificial Sequence: Synthetic oligonucleotide
atggtccacagcagcgaaagc

SEQ ID NO: 35222 - DNA, 21 bp, Artificial Sequence
  Description of Artificial Sequence: Synthetic oligonucleotide
atggtcatccacccagaccac

SEQ ID NO: 35223 - DNA, 21 bp, Artificial Sequence
  Description of Artificial Sequence: Synthetic oligonucleotide
atggtcctcaaactcgcagca

SEQ ID NO: 35224 - DNA, 21 bp, Artificial Sequence
  Description of Artificial Sequence: Synthetic oligonucleotide
atggtcaacgtcatcatgcca

SEQ ID NO: 35225 - DNA, 21 bp, Artificial Sequence
  Description of Artificial Sequence: Synthetic oligonucleotide
atggtcaactacctcgacgtc

SEQ ID NO: 35226 - DNA, 21 bp, Artificial Sequence
  Description of Artificial Sequence: Synthetic oligonucleotide
atggtcccaggaaacagcgga

SEQ ID NO: 35227 - DNA, 21 bp, Artificial Sequence
  Description of Artificial Sequence: Synthetic oligonucleotide
atggtcccaagagaaaacctc

SEQ ID NO: 35228 - DNA, 21 bp, Artificial Sequence
  Description of Artificial Sequence: Synthetic oligonucleotide
atggtcccaagccaacacagc

SEQ ID NO: 35229 - DNA, 21 bp, Artificial Sequence
  Description of Artificial Sequence: Synthetic oligonucleotide
atggtcccaagcagcgaaatg

SEQ ID NO: 35230 - DNA, 21 bp, Artificial Sequence
  Description of Artificial Sequence: Synthetic oligonucleotide
atggtccaaagaacaacaaca

SEQ ID NO: 35231 - DNA, 21 bp, Artificial Sequence
  Description of Artificial Sequence: Synthetic oligonucleotide
atggtcagagcactcccatgc

SEQ ID NO: 35232 - DNA, 21 bp, Artificial Sequence
  Description of Artificial Sequence: Synthetic oligonucleotide
atggtcagcaacagacaaaca

SEQ ID NO: 35233 - DNA, 21 bp, Artificial Sequence
  Description of Artificial Sequence: Synthetic oligonucleotide
atggtcagcccaagcccaaca

SEQ ID NO: 35234 - DNA, 21 bp, Artificial Sequence
  Description of Artificial Sequence: Synthetic oligonucleotide
atggtcagcgtcgacagagac

SEQ ID NO: 35235 - DNA, 21 bp, Artificial Sequence
  Description of Artificial Sequence: Synthetic oligonucleotide
atggtcacactcacaccagga

SEQ ID NO: 35236 - DNA, 21 bp, Artificial Sequence
  Description of Artificial Sequence: Synthetic oligonucleotide
atggtcacaaacgtcacaaaa

SEQ ID NO: 35237 - DNA, 21 bp, Artificial Sequence
  Description of Artificial Sequence: Synthetic oligonucleotide
atggtcacaagaccagaaagc

SEQ ID NO: 35238 - DNA, 21 bp, Artificial Sequence
  Description of Artificial Sequence: Synthetic oligonucleotide
atggtcacaagcagcacaagc

SEQ ID NO: 35239 - DNA, 21 bp, Artificial Sequence
  Description of Artificial Sequence: Synthetic oligonucleotide
atggtcacatacggacaacaa

SEQ ID NO: 35240 - DNA, 21 bp, Artificial Sequence
  Description of Artificial Sequence: Synthetic oligonucleotide
atggtcgtccaccacaacaac

SEQ ID NO: 35241 - DNA, 21 bp, Artificial Sequence
  Description of Artificial Sequence: Synthetic oligonucleotide
atggtcgtcaaaatggtcagc

SEQ ID NO: 35242 - DNA, 21 bp, Artificial Sequence
  Description of Artificial Sequence: Synthetic oligonucleotide
atgtggaacaaagaacacgac

SEQ ID NO: 35243 - DNA, 21 bp, Artificial Sequence
  Description of Artificial Sequence: Synthetic oligonucleotide
atgtacgacaacgacgtctgg

SEQ ID NO: 35244 - DNA, 21 bp, Artificial Sequence
  Description of Artificial Sequence: Synthetic oligonucleotide
atgtacgacagaagcggactc

SEQ ID NO: 35245 - DNA, 21 bp, Artificial Sequence
  Description of Artificial Sequence: Synthetic oligonucleotide
atgtacgaaagcagaggagtc

SEQ ID NO: 35246 - DNA, 21 bp, Artificial Sequence
  Description of Artificial Sequence: Synthetic oligonucleotide
atgtacccaggaatgatgatg

SEQ ID NO: 35247 - DNA, 21 bp, Artificial Sequence
  Description of Artificial Sequence: Synthetic oligonucleotide
atgtacccaagcggaatcgtc

SEQ ID NO: 35248 - DNA, 21 bp, Artificial Sequence
  Description of Artificial Sequence: Synthetic oligonucleotide
atgtacccaacacacacagga

SEQ ID NO: 35249 - DNA, 21 bp, Artificial Sequence
  Description of Artificial Sequence: Synthetic oligonucleotide
atgtacccagtcagactcgac

SEQ ID NO: 35250 - DNA, 21 bp, Artificial Sequence
  Description of Artificial Sequence: Synthetic oligonucleotide
atgtaccaagaacacacagaa

SEQ ID NO: 35251 - DNA, 21 bp, Artificial Sequence
  Description of Artificial Sequence: Synthetic oligonucleotide
atgtaccaacaagcacacagc

SEQ ID NO: 35252 - DNA, 21 bp, Artificial Sequence
  Description of Artificial Sequence: Synthetic oligonucleotide
atgtacagagacgaactcaca

SEQ ID NO: 35253 - DNA, 21 bp, Artificial Sequence
  Description of Artificial Sequence: Synthetic oligonucleotide
atgtacagcatgagcaacgtc

SEQ ID NO: 35254 - DNA, 21 bp, Artificial Sequence
  Description of Artificial Sequence: Synthetic oligonucleotide
atgtacagcacacaaagcagc

SEQ ID NO: 35255 - DNA, 21 bp, Artificial Sequence
  Description of Artificial Sequence: Synthetic oligonucleotide
atgtacacaagcatggcagga

SEQ ID NO: 35256 - DNA, 21 bp, Artificial Sequence
  Description of Artificial Sequence: Synthetic oligonucleotide
atgtacgtcgcagcaagccca

SEQ ID NO: 35257 - DNA, 21 bp, Artificial Sequence
  Description of Artificial Sequence: Synthetic oligonucleotide
aacgcagcaccaagcacaatc

SEQ ID NO: 35258 - DNA, 21 bp, Artificial Sequence
  Description of Artificial Sequence: Synthetic oligonucleotide
aacgcagcaagactcacaagc

SEQ ID NO: 35259 - DNA, 21 bp, Artificial Sequence
  Description of Artificial Sequence: Synthetic oligonucleotide
aacgcagcaagcccaggattc

SEQ ID NO: 35260 - DNA, 21 bp, Artificial Sequence
  Description of Artificial Sequence: Synthetic oligonucleotide
aacgcagcaagccaaagccca

SEQ ID NO: 35261 - DNA, 21 bp, Artificial Sequence
  Description of Artificial Sequence: Synthetic oligonucleotide
aacgcagacgcactcggaagc

SEQ ID NO: 35262 - DNA, 21 bp, Artificial Sequence
  Description of Artificial Sequence: Synthetic oligonucleotide
aacgcagacccaagagacaga

SEQ ID NO: 35263 - DNA, 21 bp, Artificial Sequence
  Description of Artificial Sequence: Synthetic oligonucleotide
aacgcagacagaagaagcgaa

SEQ ID NO: 35264 - DNA, 21 bp, Artificial Sequence
  Description of Artificial Sequence: Synthetic oligonucleotide
aacgcagaagcattcctcgac

SEQ ID NO: 35265 - DNA, 21 bp, Artificial Sequence
  Description of Artificial Sequence: Synthetic oligonucleotide
aacgcagaagacagaacagtc

SEQ ID NO: 35266 - DNA, 21 bp, Artificial Sequence
  Description of Artificial Sequence: Synthetic oligonucleotide
aacgcattcagcacaagcaca

SEQ ID NO: 35267 - DNA, 21 bp, Artificial Sequence
  Description of Artificial Sequence: Synthetic oligonucleotide
aacgcaggaggaacatgggac

SEQ ID NO: 35268 - DNA, 21 bp, Artificial Sequence
  Description of Artificial Sequence: Synthetic oligonucleotide
aacgcaggaacaagacaagca

SEQ ID NO: 35269 - DNA, 21 bp, Artificial Sequence
  Description of Artificial Sequence: Synthetic oligonucleotide
aacgcacacctcagcctcaac

SEQ ID NO: 35270 - DNA, 21 bp, Artificial Sequence
  Description of Artificial Sequence: Synthetic oligonucleotide
aacgcacacagcacactcgtc

SEQ ID NO: 35271 - DNA, 21 bp, Artificial Sequence
  Description of Artificial Sequence: Synthetic oligonucleotide
aacgcacacacagacagacaa

SEQ ID NO: 35272 - DNA, 21 bp, Artificial Sequence
  Description of Artificial Sequence: Synthetic oligonucleotide
aacgcacacacacaaatccaa

SEQ ID NO: 35273 - DNA, 21 bp, Artificial Sequence
  Description of Artificial Sequence: Synthetic oligonucleotide
aacgcaaaagcactcgcaatg

SEQ ID NO: 35274 - DNA, 21 bp, Artificial Sequence
  Description of Artificial Sequence: Synthetic oligonucleotide
aacgcaaaaagcacaatcgga

SEQ ID NO: 35275 - DNA, 21 bp, Artificial Sequence
  Description of Artificial Sequence: Synthetic oligonucleotide
aacgcactcgcaagaagcgga

SEQ ID NO: 35276 - DNA, 21 bp, Artificial Sequence
  Description of Artificial Sequence: Synthetic oligonucleotide
aacgcactcgacgacaacgtc

SEQ ID NO: 35277 - DNA, 21 bp, Artificial Sequence
  Description of Artificial Sequence: Synthetic oligonucleotide
aacgcactcgacagaagcatg

SEQ ID NO: 35278 - DNA, 21 bp, Artificial Sequence
  Description of Artificial Sequence: Synthetic oligonucleotide
aacgcactcgaagcaagcgga

SEQ ID NO: 35279 - DNA, 21 bp, Artificial Sequence
  Description of Artificial Sequence: Synthetic oligonucleotide
aacgcactcaacccaaacttc

SEQ ID NO: 35280 - DNA, 21 bp, Artificial Sequence
  Description of Artificial Sequence: Synthetic oligonucleotide
aacgcactcagaagctacagc

SEQ ID NO: 35281 - DNA, 21 bp, Artificial Sequence
  Description of Artificial Sequence: Synthetic oligonucleotide
aacgcactcagccacgtcaca

SEQ ID NO: 35282 - DNA, 21 bp, Artificial Sequence
  Description of Artificial Sequence: Synthetic oligonucleotide
aacgcactcgtcagcgaaagc

SEQ ID NO: 35283 - DNA, 21 bp, Artificial Sequence
  Description of Artificial Sequence: Synthetic oligonucleotide
aacgcaaacggaagcagagtc

SEQ ID NO: 35284 - DNA, 21 bp, Artificial Sequence
  Description of Artificial Sequence: Synthetic oligonucleotide
aacgcaaaccaccaaaacgtc

SEQ ID NO: 35285 - DNA, 21 bp, Artificial Sequence
  Description of Artificial Sequence: Synthetic oligonucleotide
aacgcaaacctcaacagcgca

SEQ ID NO: 35286 - DNA, 21 bp, Artificial Sequence
  Description of Artificial Sequence: Synthetic oligonucleotide
aacgcaaacacaggaagactc

SEQ ID NO: 35287 - DNA, 21 bp, Artificial Sequence
  Description of Artificial Sequence: Synthetic oligonucleotide
aacgcaaacgtcccaaacaga

SEQ ID NO: 35288 - DNA, 21 bp, Artificial Sequence
  Description of Artificial Sequence: Synthetic oligonucleotide
aacgcaccaagaagcgcagtc

SEQ ID NO: 35289 - DNA, 21 bp, Artificial Sequence
  Description of Artificial Sequence: Synthetic oligonucleotide
aacgcaccaagcgaaagcaga

SEQ ID NO: 35290 - DNA, 21 bp, Artificial Sequence
  Description of Artificial Sequence: Synthetic oligonucleotide
aacgcacaaatcagaccaatg

SEQ ID NO: 35291 - DNA, 21 bp, Artificial Sequence
  Description of Artificial Sequence: Synthetic oligonucleotide
aacgcaagactcagcacaagc

SEQ ID NO: 35292 - DNA, 21 bp, Artificial Sequence
  Description of Artificial Sequence: Synthetic oligonucleotide
aacgcaagaatgctcgcaagc

SEQ ID NO: 35293 - DNA, 21 bp, Artificial Sequence
  Description of Artificial Sequence: Synthetic oligonucleotide
aacgcaagaccacacgaccca

SEQ ID NO: 35294 - DNA, 21 bp, Artificial Sequence
  Description of Artificial Sequence: Synthetic oligonucleotide
aacgcaagaccaagcgacatg

SEQ ID NO: 35295 - DNA, 21 bp, Artificial Sequence
  Description of Artificial Sequence: Synthetic oligonucleotide
aacgcaagaagcatcgactac

SEQ ID NO: 35296 - DNA, 21 bp, Artificial Sequence
  Description of Artificial Sequence: Synthetic oligonucleotide
aacgcaagaagcagcagctac

SEQ ID NO: 35297 - DNA, 21 bp, Artificial Sequence
  Description of Artificial Sequence: Synthetic oligonucleotide
aacgcaagagtcgaagcacca

SEQ ID NO: 35298 - DNA, 21 bp, Artificial Sequence
  Description of Artificial Sequence: Synthetic oligonucleotide
aacgcaagatacacacacagc

SEQ ID NO: 35299 - DNA, 21 bp, Artificial Sequence
  Description of Artificial Sequence: Synthetic oligonucleotide
aacgcaagcggactcccaaga

SEQ ID NO: 35300 - DNA, 21 bp, Artificial Sequence
  Description of Artificial Sequence: Synthetic oligonucleotide
aacgcaagcatccacagccac

SEQ ID NO: 35301 - DNA, 21 bp, Artificial Sequence
  Description of Artificial Sequence: Synthetic oligonucleotide
aacgcaagcctcccactcagc

SEQ ID NO: 35302 - DNA, 21 bp, Artificial Sequence
  Description of Artificial Sequence: Synthetic oligonucleotide
aacgcaagcaacagcgaaaaa

SEQ ID NO: 35303 - DNA, 21 bp, Artificial Sequence
  Description of Artificial Sequence: Synthetic oligonucleotide
aacgcaagcccaatcagactc

SEQ ID NO: 35304 - DNA, 21 bp, Artificial Sequence
  Description of Artificial Sequence: Synthetic oligonucleotide
aacgcaagcagcagaagcctc

SEQ ID NO: 35305 - DNA, 21 bp, Artificial Sequence
  Description of Artificial Sequence: Synthetic oligonucleotide
aacgcaagcacagtcccagaa

SEQ ID NO: 35306 - DNA, 21 bp, Artificial Sequence
  Description of Artificial Sequence: Synthetic oligonucleotide
aacgcaacagcagacggattc

SEQ ID NO: 35307 - DNA, 21 bp, Artificial Sequence
  Description of Artificial Sequence: Synthetic oligonucleotide
aacgcaacacacccaaacttc

SEQ ID NO: 35308 - DNA, 21 bp, Artificial Sequence
  Description of Artificial Sequence: Synthetic oligonucleotide
aacgcaacacacacaagcaca

SEQ ID NO: 35309 - DNA, 21 bp, Artificial Sequence
  Description of Artificial Sequence: Synthetic oligonucleotide
aacgcaacaccagtcgcagtc

SEQ ID NO: 35310 - DNA, 21 bp, Artificial Sequence
  Description of Artificial Sequence: Synthetic oligonucleotide
aacgcaacaagcggaagccac

SEQ ID NO: 35311 - DNA, 21 bp, Artificial Sequence
  Description of Artificial Sequence: Synthetic oligonucleotide
aacgcaacaagcacactctgc

SEQ ID NO: 35312 - DNA, 21 bp, Artificial Sequence
  Description of Artificial Sequence: Synthetic oligonucleotide
aacgcaacaagctacacaatg

SEQ ID NO: 35313 - DNA, 21 bp, Artificial Sequence
  Description of Artificial Sequence: Synthetic oligonucleotide
aacgcaacagtcagcccaaga

SEQ ID NO: 35314 - DNA, 21 bp, Artificial Sequence
  Description of Artificial Sequence: Synthetic oligonucleotide
aacgcagtcccaggaagaagc

SEQ ID NO: 35315 - DNA, 21 bp, Artificial Sequence
  Description of Artificial Sequence: Synthetic oligonucleotide
aacgcagtcccaatcccacca

SEQ ID NO: 35316 - DNA, 21 bp, Artificial Sequence
  Description of Artificial Sequence: Synthetic oligonucleotide
aacgcagtccaaagcctcatg

SEQ ID NO: 35317 - DNA, 21 bp, Artificial Sequence
  Description of Artificial Sequence: Synthetic oligonucleotide
aacgcagtcagcgtcaacagc

SEQ ID NO: 35318 - DNA, 21 bp, Artificial Sequence
  Description of Artificial Sequence: Synthetic oligonucleotide
aacgcatggaaaacaccagtc

SEQ ID NO: 35319 - DNA, 21 bp, Artificial Sequence
  Description of Artificial Sequence: Synthetic oligonucleotide
aacgcatacacaacaggacca

SEQ ID NO: 35320 - DNA, 21 bp, Artificial Sequence
  Description of Artificial Sequence: Synthetic oligonucleotide
aactgcgacgcagtcgcatgg

SEQ ID NO: 35321 - DNA, 21 bp, Artificial Sequence
  Description of Artificial Sequence: Synthetic oligonucleotide
aacgacgacatccaaagaaaa

SEQ ID NO: 35322 - DNA, 21 bp, Artificial Sequence
  Description of Artificial Sequence: Synthetic oligonucleotide
aacgacggacacagaaacttc

SEQ ID NO: 35323 - DNA, 21 bp, Artificial Sequence
  Description of Artificial Sequence: Synthetic oligonucleotide
aacgacatcctcctcctcagc

SEQ ID NO: 35324 - DNA, 21 bp, Artificial Sequence
  Description of Artificial Sequence: Synthetic oligonucleotide
aacgacatcacagaagtccca

SEQ ID NO: 35325 - DNA, 21 bp, Artificial Sequence
  Description of Artificial Sequence: Synthetic oligonucleotide
aacgacaaattcagactcagc

SEQ ID NO: 35326 - DNA, 21 bp, Artificial Sequence
  Description of Artificial Sequence: Synthetic oligonucleotide
aacgacaaaatgctccaaaga

SEQ ID NO: 35327 - DNA, 21 bp, Artificial Sequence
  Description of Artificial Sequence: Synthetic oligonucleotide
aacgacccaaaagtcccacaa

SEQ ID NO: 35328 - DNA, 21 bp, Artificial Sequence
  Description of Artificial Sequence: Synthetic oligonucleotide
aacgacccaatgacaagccaa

SEQ ID NO: 35329 - DNA, 21 bp, Artificial Sequence
  Description of Artificial Sequence: Synthetic oligonucleotide
aacgacagaatgaaaaacagc

SEQ ID NO: 35330 - DNA, 21 bp, Artificial Sequence
  Description of Artificial Sequence: Synthetic oligonucleotide
aacgacagaagcaaataccca

SEQ ID NO: 35331 - DNA, 21 bp, Artificial Sequence
  Description of Artificial Sequence: Synthetic oligonucleotide
aacgacagcagcctcggagca

SEQ ID NO: 35332 - DNA, 21 bp, Artificial Sequence
  Description of Artificial Sequence: Synthetic oligonucleotide
aacgacagcagcagcacaatg

SEQ ID NO: 35333 - DNA, 21 bp, Artificial Sequence
  Description of Artificial Sequence: Synthetic oligonucleotide
aacgacacattcagcagcctc

SEQ ID NO: 35334 - DNA, 21 bp, Artificial Sequence
  Description of Artificial Sequence: Synthetic oligonucleotide
aacgacacaggagcactcatg

SEQ ID NO: 35335 - DNA, 21 bp, Artificial Sequence
  Description of Artificial Sequence: Synthetic oligonucleotide
aacgacacatacagaacaagc

SEQ ID NO: 35336 - DNA, 21 bp, Artificial Sequence
  Description of Artificial Sequence: Synthetic oligonucleotide
aacgacgtcccaaacacacca

SEQ ID NO: 35337 - DNA, 21 bp, Artificial Sequence
  Description of Artificial Sequence: Synthetic oligonucleotide
aacgacgtcacaacacacaaa

SEQ ID NO: 35338 - DNA, 21 bp, Artificial Sequence
  Description of Artificial Sequence: Synthetic oligonucleotide
aacgactggctcatcgcagga

SEQ ID NO: 35339 - DNA, 21 bp, Artificial Sequence
  Description of Artificial Sequence: Synthetic oligonucleotide
aacgaagcactcagccaactc

SEQ ID NO: 35340 - DNA, 21 bp, Artificial Sequence
  Description of Artificial Sequence: Synthetic oligonucleotide
aacgaagcagtcgcaagcatg

SEQ ID NO: 35341 - DNA, 21 bp, Artificial Sequence
  Description of Artificial Sequence: Synthetic oligonucleotide
aacgaatgcgacgacctcatg

SEQ ID NO: 35342 - DNA, 21 bp, Artificial Sequence
  Description of Artificial Sequence: Synthetic oligonucleotide
aacgaaggattcctcctcgga

SEQ ID NO: 35343 - DNA, 21 bp, Artificial Sequence
  Description of Artificial Sequence: Synthetic oligonucleotide
aacgaacaccacaaaacagaa

SEQ ID NO: 35344 - DNA, 21 bp, Artificial Sequence
  Description of Artificial Sequence: Synthetic oligonucleotide
aacgaaatcttcacaccaatg

SEQ ID NO: 35345 - DNA, 21 bp, Artificial Sequence
  Description of Artificial Sequence: Synthetic oligonucleotide
aacgaactcgcaagcagagca

SEQ ID NO: 35346 - DNA, 21 bp, Artificial Sequence
  Description of Artificial Sequence: Synthetic oligonucleotide
aacgaactcggaggacaccac

SEQ ID NO: 35347 - DNA, 21 bp, Artificial Sequence
  Description of Artificial Sequence: Synthetic oligonucleotide
aacgaactcgtcagcaaaaca

SEQ ID NO: 35348 - DNA, 21 bp, Artificial Sequence
  Description of Artificial Sequence: Synthetic oligonucleotide
aacgaaatgagcggacaaaga

SEQ ID NO: 35349 - DNA, 21 bp, Artificial Sequence
  Description of Artificial Sequence: Synthetic oligonucleotide
aacgaaccactcggaatgaga

SEQ ID NO: 35350 - DNA, 21 bp, Artificial Sequence
  Description of Artificial Sequence: Synthetic oligonucleotide
aacgaacaacacgcaacacac

SEQ ID NO: 35351 - DNA, 21 bp, Artificial Sequence
  Description of Artificial Sequence: Synthetic oligonucleotide
aacgaaagaggaagcagctgg

SEQ ID NO: 35352 - DNA, 21 bp, Artificial Sequence
  Description of Artificial Sequence: Synthetic oligonucleotide
aacgaaagacaccaccaagtc

SEQ ID NO: 35353 - DNA, 21 bp, Artificial Sequence
  Description of Artificial Sequence: Synthetic oligonucleotide
aacgaaagaaacgtccaactc

SEQ ID NO: 35354 - DNA, 21 bp, Artificial Sequence
  Description of Artificial Sequence: Synthetic oligonucleotide
aacgaaagaagagtcgtcctc

SEQ ID NO: 35355 - DNA, 21 bp, Artificial Sequence
  Description of Artificial Sequence: Synthetic oligonucleotide
aacgaaagccacaaaaacgtc

SEQ ID NO: 35356 - DNA, 21 bp, Artificial Sequence
  Description of Artificial Sequence: Synthetic oligonucleotide
aacgaaagcctcagaacagca

SEQ ID NO: 35357 - DNA, 21 bp, Artificial Sequence
  Description of Artificial Sequence: Synthetic oligonucleotide
aacgaaagcctcacaagcgca

SEQ ID NO: 35358 - DNA, 21 bp, Artificial Sequence
  Description of Artificial Sequence: Synthetic oligonucleotide
aacgaaagcgtcagaagctac

SEQ ID NO: 35359 - DNA, 21 bp, Artificial Sequence
  Description of Artificial Sequence: Synthetic oligonucleotide
aacgaatacgtcctcggactc

SEQ ID NO: 35360 - DNA, 21 bp, Artificial Sequence
  Description of Artificial Sequence: Synthetic oligonucleotide
aacttcgcagcaagaagctac

SEQ ID NO: 35361 - DNA, 21 bp, Artificial Sequence
  Description of Artificial Sequence: Synthetic oligonucleotide
aacttcgacagacacggagca

SEQ ID NO: 35362 - DNA, 21 bp, Artificial Sequence
  Description of Artificial Sequence: Synthetic oligonucleotide
aacttcgacagaccaagaaca

SEQ ID NO: 35363 - DNA, 21 bp, Artificial Sequence
  Description of Artificial Sequence: Synthetic oligonucleotide
aacttcaacacaagagtcgca

SEQ ID NO: 35364 - DNA, 21 bp, Artificial Sequence
  Description of Artificial Sequence: Synthetic oligonucleotide
aacttcagagtcagcagcgga

SEQ ID NO: 35365 - DNA, 21 bp, Artificial Sequence
  Description of Artificial Sequence: Synthetic oligonucleotide
aacttcagcccaacaagccca

SEQ ID NO: 35366 - DNA, 21 bp, Artificial Sequence
  Description of Artificial Sequence: Synthetic oligonucleotide
aacttcacaaaagcaggagca

SEQ ID NO: 35367 - DNA, 21 bp, Artificial Sequence
  Description of Artificial Sequence: Synthetic oligonucleotide
aacttcacaaaaagcgcagga

SEQ ID NO: 35368 - DNA, 21 bp, Artificial Sequence
  Description of Artificial Sequence: Synthetic oligonucleotide
aacttcacactcaaaccaatc

SEQ ID NO: 35369 - DNA, 21 bp, Artificial Sequence
  Description of Artificial Sequence: Synthetic oligonucleotide
aacttcgtcggagtcccaaca

SEQ ID NO: 35370 - DNA, 21 bp, Artificial Sequence
  Description of Artificial Sequence: Synthetic oligonucleotide
aacttcgtcgtcccaagcgac

SEQ ID NO: 35371 - DNA, 21 bp, Artificial Sequence
  Description of Artificial Sequence: Synthetic oligonucleotide
aacggagcagcagaagtcgca

SEQ ID NO: 35372 - DNA, 21 bp, Artificial Sequence
  Description of Artificial Sequence: Synthetic oligonucleotide
aacggagcagacagagcaagc

SEQ ID NO: 35373 - DNA, 21 bp, Artificial Sequence
  Description of Artificial Sequence: Synthetic oligonucleotide
aacggagcaggactcacaatc

SEQ ID NO: 35374 - DNA, 21 bp, Artificial Sequence
  Description of Artificial Sequence: Synthetic oligonucleotide
aacggagcactcagactccca

SEQ ID NO: 35375 - DNA, 21 bp, Artificial Sequence
  Description of Artificial Sequence: Synthetic oligonucleotide
aacggagacgcatgcccaagc

SEQ ID NO: 35376 - DNA, 21 bp, Artificial Sequence
  Description of Artificial Sequence: Synthetic oligonucleotide
aacggagaagcacaagcaaga

SEQ ID NO: 35377 - DNA, 21 bp, Artificial Sequence
  Description of Artificial Sequence: Synthetic oligonucleotide
aacggagaaccattcagcatc

SEQ ID NO: 35378 - DNA, 21 bp, Artificial Sequence
  Description of Artificial Sequence: Synthetic oligonucleotide
aacggaggagcatacacactc

SEQ ID NO: 35379 - DNA, 21 bp, Artificial Sequence
  Description of Artificial Sequence: Synthetic oligonucleotide
aacggaggaatcagcagaaca

SEQ ID NO: 35380 - DNA, 21 bp, Artificial Sequence
  Description of Artificial Sequence: Synthetic oligonucleotide
aacggaggaaacctcctcctc

SEQ ID NO: 35381 - DNA, 21 bp, Artificial Sequence
  Description of Artificial Sequence: Synthetic oligonucleotide
aacggacacttcgtcgacgca

SEQ ID NO: 35382 - DNA, 21 bp, Artificial Sequence
  Description of Artificial Sequence: Synthetic oligonucleotide
aacggacacaaccacatgctc

SEQ ID NO: 35383 - DNA, 21 bp, Artificial Sequence
  Description of Artificial Sequence: Synthetic oligonucleotide
aacggacacagcgtcagcgaa

SEQ ID NO: 35384 - DNA, 21 bp, Artificial Sequence
  Description of Artificial Sequence: Synthetic oligonucleotide
aacggaaaaaacggaagcaca

SEQ ID NO: 35385 - DNA, 21 bp, Artificial Sequence
  Description of Artificial Sequence: Synthetic oligonucleotide
aacggactccaaacaggagtc

SEQ ID NO: 35386 - DNA, 21 bp, Artificial Sequence
  Description of Artificial Sequence: Synthetic oligonucleotide
aacggaatgggagcagtcgtc

SEQ ID NO: 35387 - DNA, 21 bp, Artificial Sequence
  Description of Artificial Sequence: Synthetic oligonucleotide
aacggaatgcaaccactcaac

SEQ ID NO: 35388 - DNA, 21 bp, Artificial Sequence
  Description of Artificial Sequence: Synthetic oligonucleotide
aacggaatgtacccataccca

SEQ ID NO: 35389 - DNA, 21 bp, Artificial Sequence
  Description of Artificial Sequence: Synthetic oligonucleotide
aacggaaacgaagtcctcagc

SEQ ID NO: 35390 - DNA, 21 bp, Artificial Sequence
  Description of Artificial Sequence: Synthetic oligonucleotide
aacggaccacacagaatggtc

SEQ ID NO: 35391 - DNA, 21 bp, Artificial Sequence
  Description of Artificial Sequence: Synthetic oligonucleotide
aacggaccaccagcagtcgga

SEQ ID NO: 35392 - DNA, 21 bp, Artificial Sequence
  Description of Artificial Sequence: Synthetic oligonucleotide
aacggaccaccaaaaggaatc

SEQ ID NO: 35393 - DNA, 21 bp, Artificial Sequence
  Description of Artificial Sequence: Synthetic oligonucleotide
aacggaccaagcgcacaacaa

SEQ ID NO: 35394 - DNA, 21 bp, Artificial Sequence
  Description of Artificial Sequence: Synthetic oligonucleotide
aacggacaagcagaaccagca

SEQ ID NO: 35395 - DNA, 21 bp, Artificial Sequence
  Description of Artificial Sequence: Synthetic oligonucleotide
aacggaagccacatcgacaga

SEQ ID NO: 35396 - DNA, 21 bp, Artificial Sequence
  Description of Artificial Sequence: Synthetic oligonucleotide
aacggaagctgggtcccagca

SEQ ID NO: 35397 - DNA, 21 bp, Artificial Sequence
  Description of Artificial Sequence: Synthetic oligonucleotide
aacggaagctaccaaccacca

SEQ ID NO: 35398 - DNA, 21 bp, Artificial Sequence
  Description of Artificial Sequence: Synthetic oligonucleotide
aacggaacacaactcctcagc

SEQ ID NO: 35399 - DNA, 21 bp, Artificial Sequence
  Description of Artificial Sequence: Synthetic oligonucleotide
aacggaacaacagcactcttc

SEQ ID NO: 35400 - DNA, 21 bp, Artificial Sequence
  Description of Artificial Sequence: Synthetic oligonucleotide
aacggaacatacagcgtcgaa

SEQ ID NO: 35401 - DNA, 21 bp, Artificial Sequence
  Description of Artificial Sequence: Synthetic oligonucleotide
aacggagtcctcctccacgca

SEQ ID NO: 35402 - DNA, 21 bp, Artificial Sequence
  Description of Artificial Sequence: Synthetic oligonucleotide
aacggagtcccaagcctcgga

SEQ ID NO: 35403 - DNA, 21 bp, Artificial Sequence
  Description of Artificial Sequence: Synthetic oligonucleotide
aacggatacgcagtcagcgca

SEQ ID NO: 35404 - DNA, 21 bp, Artificial Sequence
  Description of Artificial Sequence: Synthetic oligonucleotide
aacggatacacaagagacgaa

SEQ ID NO: 35405 - DNA, 21 bp, Artificial Sequence
  Description of Artificial Sequence: Synthetic oligonucleotide
aaccacgcaagcaacacaaca

SEQ ID NO: 35406 - DNA, 21 bp, Artificial Sequence
  Description of Artificial Sequence: Synthetic oligonucleotide
aaccaccacaacgcatacagc

SEQ ID NO: 35407 - DNA, 21 bp, Artificial Sequence
  Description of Artificial Sequence: Synthetic oligonucleotide
aaccacatcacatacgaaaac

SEQ ID NO: 35408 - DNA, 21 bp, Artificial Sequence
  Description of Artificial Sequence: Synthetic oligonucleotide
aaccacaaatgcgcagacgaa

SEQ ID NO: 35409 - DNA, 21 bp, Artificial Sequence
  Description of Artificial Sequence: Synthetic oligonucleotide
aaccacaaaggactcaacctc

SEQ ID NO: 35410 - DNA, 21 bp, Artificial Sequence
  Description of Artificial Sequence: Synthetic oligonucleotide
aaccacatgccaagcgtctac

SEQ ID NO: 35411 - DNA, 21 bp, Artificial Sequence
  Description of Artificial Sequence: Synthetic oligonucleotide
aaccacaacggactccaaatg

SEQ ID NO: 35412 - DNA, 21 bp, Artificial Sequence
  Description of Artificial Sequence: Synthetic oligonucleotide
aaccacaacagaccagcaaac

SEQ ID NO: 35413 - DNA, 21 bp, Artificial Sequence
  Description of Artificial Sequence: Synthetic oligonucleotide
aaccacccaagcgcaagcaca

SEQ ID NO: 35414 - DNA, 21 bp, Artificial Sequence
  Description of Artificial Sequence: Synthetic oligonucleotide
aaccacccagtcccaagcagc

SEQ ID NO: 35415 - DNA, 21 bp, Artificial Sequence
  Description of Artificial Sequence: Synthetic oligonucleotide
aaccacccatacccaaaaatg

SEQ ID NO: 35416 - DNA, 21 bp, Artificial Sequence
  Description of Artificial Sequence: Synthetic oligonucleotide
aaccaccaactcgtcagcgaa

SEQ ID NO: 35417 - DNA, 21 bp, Artificial Sequence
  Description of Artificial Sequence: Synthetic oligonucleotide
aaccacagagcaagcccatac

SEQ ID NO: 35418 - DNA, 21 bp, Artificial Sequence
  Description of Artificial Sequence: Synthetic oligonucleotide
aaccacagaacaggaaacgca

SEQ ID NO: 35419 - DNA, 21 bp, Artificial Sequence
  Description of Artificial Sequence: Synthetic oligonucleotide
aaccacagaacaagcggaagc

SEQ ID NO: 35420 - DNA, 21 bp, Artificial Sequence
  Description of Artificial Sequence: Synthetic oligonucleotide
aaccacagcgcagaaatgagc

SEQ ID NO: 35421 - DNA, 21 bp, Artificial Sequence
  Description of Artificial Sequence: Synthetic oligonucleotide
aaccacagcgaaacactcatg

SEQ ID NO: 35422 - DNA, 21 bp, Artificial Sequence
  Description of Artificial Sequence: Synthetic oligonucleotide
aaccacagcggaacaatcgtc

SEQ ID NO: 35423 - DNA, 21 bp, Artificial Sequence
  Description of Artificial Sequence: Synthetic oligonucleotide
aaccacagcccagtcccactc

SEQ ID NO: 35424 - DNA, 21 bp, Artificial Sequence
  Description of Artificial Sequence: Synthetic oligonucleotide
aaccacagcagcgacggagca

SEQ ID NO: 35425 - DNA, 21 bp, Artificial Sequence
  Description of Artificial Sequence: Synthetic oligonucleotide
aaccacacaggaagcacactc

SEQ ID NO: 35426 - DNA, 21 bp, Artificial Sequence
  Description of Artificial Sequence: Synthetic oligonucleotide
aaccacacaccaagcatccca

SEQ ID NO: 35427 - DNA, 21 bp, Artificial Sequence
  Description of Artificial Sequence: Synthetic oligonucleotide
aaccacgtcgcaaaaagctgg

SEQ ID NO: 35428 - DNA, 21 bp, Artificial Sequence
  Description of Artificial Sequence: Synthetic oligonucleotide
aaccactacaacgtcaacgaa

SEQ ID NO: 35429 - DNA, 21 bp, Artificial Sequence
  Description of Artificial Sequence: Synthetic oligonucleotide
aacatcgcaaacgcactcaac

SEQ ID NO: 35430 - DNA, 21 bp, Artificial Sequence
  Description of Artificial Sequence: Synthetic oligonucleotide
aacatcttcgacgacgcagac

SEQ ID NO: 35431 - DNA, 21 bp, Artificial Sequence
  Description of Artificial Sequence: Synthetic oligonucleotide
aacatcggagcaacaccaagc

SEQ ID NO: 35432 - DNA, 21 bp, Artificial Sequence
  Description of Artificial Sequence: Synthetic oligonucleotide
aacatcggaggaatgatgagc

SEQ ID NO: 35433 - DNA, 21 bp, Artificial Sequence
  Description of Artificial Sequence: Synthetic oligonucleotide
aacatcggaatgacaacagga

SEQ ID NO: 35434 - DNA, 21 bp, Artificial Sequence
  Description of Artificial Sequence: Synthetic oligonucleotide
aacatcaaacacggaccacac

SEQ ID NO: 35435 - DNA, 21 bp, Artificial Sequence
  Description of Artificial Sequence: Synthetic oligonucleotide
aacatcaaactcggacacgac

SEQ ID NO: 35436 - DNA, 21 bp, Artificial Sequence
  Description of Artificial Sequence: Synthetic oligonucleotide
aacatcctccaatacacaagc

SEQ ID NO: 35437 - DNA, 21 bp, Artificial Sequence
  Description of Artificial Sequence: Synthetic oligonucleotide
aacatcctcagaacagacgaa

SEQ ID NO: 35438 - DNA, 21 bp, Artificial Sequence
  Description of Artificial Sequence: Synthetic oligonucleotide
aacatcccagacagattcatc

SEQ ID NO: 35439 - DNA, 21 bp, Artificial Sequence
  Description of Artificial Sequence: Synthetic oligonucleotide
aacatcccactcggagcagca

SEQ ID NO: 35440 - DNA, 21 bp, Artificial Sequence
  Description of Artificial Sequence: Synthetic oligonucleotide
aacatcccaccaagaccactc

SEQ ID NO: 35441 - DNA, 21 bp, Artificial Sequence
  Description of Artificial Sequence: Synthetic oligonucleotide
aacatccaagtcagaagcgga

SEQ ID NO: 35442 - DNA, 21 bp, Artificial Sequence
  Description of Artificial Sequence: Synthetic oligonucleotide
aacatcagagacctcgtccac

SEQ ID NO: 35443 - DNA, 21 bp, Artificial Sequence
  Description of Artificial Sequence: Synthetic oligonucleotide
aacatcagaacaaacaacatc

SEQ ID NO: 35444 - DNA, 21 bp, Artificial Sequence
  Description of Artificial Sequence: Synthetic oligonucleotide
aacatcagcctcccactcctc

SEQ ID NO: 35445 - DNA, 21 bp, Artificial Sequence
  Description of Artificial Sequence: Synthetic oligonucleotide
aacatcagctacacaatcgaa

SEQ ID NO: 35446 - DNA, 21 bp, Artificial Sequence
  Description of Artificial Sequence: Synthetic oligonucleotide
aacatcacactcgcacacctc

SEQ ID NO: 35447 - DNA, 21 bp, Artificial Sequence
  Description of Artificial Sequence: Synthetic oligonucleotide
aacatcacaagcaacgaaagc

SEQ ID NO: 35448 - DNA, 21 bp, Artificial Sequence
  Description of Artificial Sequence: Synthetic oligonucleotide
aacatcacaacaagaggaaca

SEQ ID NO: 35449 - DNA, 21 bp, Artificial Sequence
  Description of Artificial Sequence: Synthetic oligonucleotide
aacatcgtcgaaagaagcaga

SEQ ID NO: 35450 - DNA, 21 bp, Artificial Sequence
  Description of Artificial Sequence: Synthetic oligonucleotide
aacaaagcactcacacacatg

SEQ ID NO: 35451 - DNA, 21 bp, Artificial Sequence
  Description of Artificial Sequence: Synthetic oligonucleotide
aacaaagaacacgtccaagga

SEQ ID NO: 35452 - DNA, 21 bp, Artificial Sequence
  Description of Artificial Sequence: Synthetic oligonucleotide
aacaaagaaccaacagacagc

SEQ ID NO: 35453 - DNA, 21 bp, Artificial Sequence
  Description of Artificial Sequence: Synthetic oligonucleotide
aacaaagaagtccacaacagc

SEQ ID NO: 35454 - DNA, 21 bp, Artificial Sequence
  Description of Artificial Sequence: Synthetic oligonucleotide
aacaaaggagtctacagcgga

SEQ ID NO: 35455 - DNA, 21 bp, Artificial Sequence
  Description of Artificial Sequence: Synthetic oligonucleotide
aacaaacacttccaagcacac

SEQ ID NO: 35456 - DNA, 21 bp, Artificial Sequence
  Description of Artificial Sequence: Synthetic oligonucleotide
aacaaaatcgacccatacaca

SEQ ID NO: 35457 - DNA, 21 bp, Artificial Sequence
  Description of Artificial Sequence: Synthetic oligonucleotide
aacaaaatgacaacatacgca

SEQ ID NO: 35458 - DNA, 21 bp, Artificial Sequence
  Description of Artificial Sequence: Synthetic oligonucleotide
aacaaacaattcacaccagaa

SEQ ID NO: 35459 - DNA, 21 bp, Artificial Sequence
  Description of Artificial Sequence: Synthetic oligonucleotide
aacaaaagcatcaacacagac

SEQ ID NO: 35460 - DNA, 21 bp, Artificial Sequence
  Description of Artificial Sequence: Synthetic oligonucleotide
aacaaaagcctcacaacagga

SEQ ID NO: 35461 - DNA, 21 bp, Artificial Sequence
  Description of Artificial Sequence: Synthetic oligonucleotide
aacaaaagcatgaacgtccca

SEQ ID NO: 35462 - DNA, 21 bp, Artificial Sequence
  Description of Artificial Sequence: Synthetic oligonucleotide
aacaaaacagacaacgtcagc

SEQ ID NO: 35463 - DNA, 21 bp, Artificial Sequence
  Description of Artificial Sequence: Synthetic oligonucleotide
aacaaaacacaaagcagacac

SEQ ID NO: 35464 - DNA, 21 bp, Artificial Sequence
  Description of Artificial Sequence: Synthetic oligonucleotide
aacaaagtcctccacgcacca

SEQ ID NO: 35465 - DNA, 21 bp, Artificial Sequence
  Description of Artificial Sequence: Synthetic oligonucleotide
aacaaagtcagcggaccaatg

SEQ ID NO: 35466 - DNA, 21 bp, Artificial Sequence
  Description of Artificial Sequence: Synthetic oligonucleotide
aacaaataccaagacctcaga

SEQ ID NO: 35467 - DNA, 21 bp, Artificial Sequence
  Description of Artificial Sequence: Synthetic oligonucleotide
aacctcgcacacacaaaattc

SEQ ID NO: 35468 - DNA, 21 bp, Artificial Sequence
  Description of Artificial Sequence: Synthetic oligonucleotide
aacctcgcactcgacgcaaga

SEQ ID NO: 35469 - DNA, 21 bp, Artificial Sequence
  Description of Artificial Sequence: Synthetic oligonucleotide
aacctcgcaccaatccaaaga

SEQ ID NO: 35470 - DNA, 21 bp, Artificial Sequence
  Description of Artificial Sequence: Synthetic oligonucleotide
aacctcgacagaccagtcaca

SEQ ID NO: 35471 - DNA, 21 bp, Artificial Sequence
  Description of Artificial Sequence: Synthetic oligonucleotide
aacctcgaaacaatcccaaga

SEQ ID NO: 35472 - DNA, 21 bp, Artificial Sequence
  Description of Artificial Sequence: Synthetic oligonucleotide
aacctcggaggaagcgtcgaa

SEQ ID NO: 35473 - DNA, 21 bp, Artificial Sequence
  Description of Artificial Sequence: Synthetic oligonucleotide
aacctcggaaaaaaagaactc

SEQ ID NO: 35474 - DNA, 21 bp, Artificial Sequence
  Description of Artificial Sequence: Synthetic oligonucleotide
aacctcggaccaacactccca

SEQ ID NO: 35475 - DNA, 21 bp, Artificial Sequence
  Description of Artificial Sequence: Synthetic oligonucleotide
aacctcggaccatacccactc

SEQ ID NO: 35476 - DNA, 21 bp, Artificial Sequence
  Description of Artificial Sequence: Synthetic oligonucleotide
aacctccacctcatcagcgca

SEQ ID NO: 35477 - DNA, 21 bp, Artificial Sequence
  Description of Artificial Sequence: Synthetic oligonucleotide
aacctccacctcccaagcagc

SEQ ID NO: 35478 - DNA, 21 bp, Artificial Sequence
  Description of Artificial Sequence: Synthetic oligonucleotide
aacctccacagaacaccagac

SEQ ID NO: 35479 - DNA, 21 bp, Artificial Sequence
  Description of Artificial Sequence: Synthetic oligonucleotide
aacctccacagcacaacagca

SEQ ID NO: 35480 - DNA, 21 bp, Artificial Sequence
  Description of Artificial Sequence: Synthetic oligonucleotide
aacctcatcgcaatgggaagc

SEQ ID NO: 35481 - DNA, 21 bp, Artificial Sequence
  Description of Artificial Sequence: Synthetic oligonucleotide
aacctcatcccaacaaaagca

SEQ ID NO: 35482 - DNA, 21 bp, Artificial Sequence
  Description of Artificial Sequence: Synthetic oligonucleotide
aacctcaaactcatgagcgga

SEQ ID NO: 35483 - DNA, 21 bp, Artificial Sequence
  Description of Artificial Sequence: Synthetic oligonucleotide
aacctcaaagtcctcgtcaca

SEQ ID NO: 35484 - DNA, 21 bp, Artificial Sequence
  Description of Artificial Sequence: Synthetic oligonucleotide
aacctcaaagtcacaagagac

SEQ ID NO: 35485 - DNA, 21 bp, Artificial Sequence
  Description of Artificial Sequence: Synthetic oligonucleotide
aacctcctcgacgtccacctc

SEQ ID NO: 35486 - DNA, 21 bp, Artificial Sequence
  Description of Artificial Sequence: Synthetic oligonucleotide
aacctcctcggacacgcagtc

SEQ ID NO: 35487 - DNA, 21 bp, Artificial Sequence
  Description of Artificial Sequence: Synthetic oligonucleotide
aacctcctcacaaacgcagtc

SEQ ID NO: 35488 - DNA, 21 bp, Artificial Sequence
  Description of Artificial Sequence: Synthetic oligonucleotide
aacctcaacgcaacaagcgtc

SEQ ID NO: 35489 - DNA, 21 bp, Artificial Sequence
  Description of Artificial Sequence: Synthetic oligonucleotide
aacctcccaccaagcagccca

SEQ ID NO: 35490 - DNA, 21 bp, Artificial Sequence
  Description of Artificial Sequence: Synthetic oligonucleotide
aacctcccaagaccaagcctc

SEQ ID NO: 35491 - DNA, 21 bp, Artificial Sequence
  Description of Artificial Sequence: Synthetic oligonucleotide
aacctcccaagaagaacagac

SEQ ID NO: 35492 - DNA, 21 bp, Artificial Sequence
  Description of Artificial Sequence: Synthetic oligonucleotide
aacctcccatacagcctcgtc

SEQ ID NO: 35493 - DNA, 21 bp, Artificial Sequence
  Description of Artificial Sequence: Synthetic oligonucleotide
aacctcccatacacacaagca

SEQ ID NO: 35494 - DNA, 21 bp, Artificial Sequence
  Description of Artificial Sequence: Synthetic oligonucleotide
aacctccaactcacaaacgga

SEQ ID NO: 35495 - DNA, 21 bp, Artificial Sequence
  Description of Artificial Sequence: Synthetic oligonucleotide
aacctcagagacggaggaaca

SEQ ID NO: 35496 - DNA, 21 bp, Artificial Sequence
  Description of Artificial Sequence: Synthetic oligonucleotide
aacctcagaggaaacccagca

SEQ ID NO: 35497 - DNA, 21 bp, Artificial Sequence
  Description of Artificial Sequence: Synthetic oligonucleotide
aacctcagaatgcaaatccca

SEQ ID NO: 35498 - DNA, 21 bp, Artificial Sequence
  Description of Artificial Sequence: Synthetic oligonucleotide
aacctcagaccaatgagcagc

SEQ ID NO: 35499 - DNA, 21 bp, Artificial Sequence
  Description of Artificial Sequence: Synthetic oligonucleotide
aacctcagcgacgacagagaa

SEQ ID NO: 35500 - DNA, 21 bp, Artificial Sequence
  Description of Artificial Sequence: Synthetic oligonucleotide
aacctcagcgacagcagaagc

SEQ ID NO: 35501 - DNA, 21 bp, Artificial Sequence
  Description of Artificial Sequence: Synthetic oligonucleotide
aacctcagccacggagtcctc

SEQ ID NO: 35502 - DNA, 21 bp, Artificial Sequence
  Description of Artificial Sequence: Synthetic oligonucleotide
aacctcagccacagaccaatg

SEQ ID NO: 35503 - DNA, 21 bp, Artificial Sequence
  Description of Artificial Sequence: Synthetic oligonucleotide
aacctcagcatgggaagccca

SEQ ID NO: 35504 - DNA, 21 bp, Artificial Sequence
  Description of Artificial Sequence: Synthetic oligonucleotide
aacctcagcaacagcgtcaaa

SEQ ID NO: 35505 - DNA, 21 bp, Artificial Sequence
  Description of Artificial Sequence: Synthetic oligonucleotide
aacctcagcccatacccaatg

SEQ ID NO: 35506 - DNA, 21 bp, Artificial Sequence
  Description of Artificial Sequence: Synthetic oligonucleotide
aacctcagcccatacacaatg

SEQ ID NO: 35507 - DNA, 21 bp, Artificial Sequence
  Description of Artificial Sequence: Synthetic oligonucleotide
aacctcagcagagacagcaca

SEQ ID NO: 35508 - DNA, 21 bp, Artificial Sequence
  Description of Artificial Sequence: Synthetic oligonucleotide
aacctcagcagcggacaagtc

SEQ ID NO: 35509 - DNA, 21 bp, Artificial Sequence
  Description of Artificial Sequence: Synthetic oligonucleotide
aacctcagctacacacaacaa

SEQ ID NO: 35510 - DNA, 21 bp, Artificial Sequence
  Description of Artificial Sequence: Synthetic oligonucleotide
aacctcacagcaggaccacca

SEQ ID NO: 35511 - DNA, 21 bp, Artificial Sequence
  Description of Artificial Sequence: Synthetic oligonucleotide
aacctcacaggaggaagcagc

SEQ ID NO: 35512 - DNA, 21 bp, Artificial Sequence
  Description of Artificial Sequence: Synthetic oligonucleotide
aacctcacacacacagtcatg

SEQ ID NO: 35513 - DNA, 21 bp, Artificial Sequence
  Description of Artificial Sequence: Synthetic oligonucleotide
aacctcacaaacagcagcatg

SEQ ID NO: 35514 - DNA, 21 bp, Artificial Sequence
  Description of Artificial Sequence: Synthetic oligonucleotide
aacctcacaagaatgatccac

SEQ ID NO: 35515 - DNA, 21 bp, Artificial Sequence
  Description of Artificial Sequence: Synthetic oligonucleotide
aacctcacagtcaaagtccaa

SEQ ID NO: 35516 - DNA, 21 bp, Artificial Sequence
  Description of Artificial Sequence: Synthetic oligonucleotide
aacctcgtccaattcgtccac

SEQ ID NO: 35517 - DNA, 21 bp, Artificial Sequence
  Description of Artificial Sequence: Synthetic oligonucleotide
aacctcgtccaaaacaaacca

SEQ ID NO: 35518 - DNA, 21 bp, Artificial Sequence
  Description of Artificial Sequence: Synthetic oligonucleotide
aacctctacgcatacgaccca

SEQ ID NO: 35519 - DNA, 21 bp, Artificial Sequence
  Description of Artificial Sequence: Synthetic oligonucleotide
aacctctacacaccataccca

SEQ ID NO: 35520 - DNA, 21 bp, Artificial Sequence
  Description of Artificial Sequence: Synthetic oligonucleotide
aacatggcacacagcccacca

SEQ ID NO: 35521 - DNA, 21 bp, Artificial Sequence
  Description of Artificial Sequence: Synthetic oligonucleotide
aacatggcacacgtccaatac

SEQ ID NO: 35522 - DNA, 21 bp, Artificial Sequence
  Description of Artificial Sequence: Synthetic oligonucleotide
aacatggcaatcgtcgaacaa

SEQ ID NO: 35523 - DNA, 21 bp, Artificial Sequence
  Description of Artificial Sequence: Synthetic oligonucleotide
aacatggcaacaatcagagtc

SEQ ID NO: 35524 - DNA, 21 bp, Artificial Sequence
  Description of Artificial Sequence: Synthetic oligonucleotide
aacatgcacatcagaagcaca

SEQ ID NO: 35525 - DNA, 21 bp, Artificial Sequence
  Description of Artificial Sequence: Synthetic oligonucleotide
aacatgcacacaagaacaagc

SEQ ID NO: 35526 - DNA, 21 bp, Artificial Sequence
  Description of Artificial Sequence: Synthetic oligonucleotide
aacatgatcgcactccaaaca

SEQ ID NO: 35527 - DNA, 21 bp, Artificial Sequence
  Description of Artificial Sequence: Synthetic oligonucleotide
aacatgaaagcaagcagcgtc

SEQ ID NO: 35528 - DNA, 21 bp, Artificial Sequence
  Description of Artificial Sequence: Synthetic oligonucleotide
aacatgctcacagacagagtc

SEQ ID NO: 35529 - DNA, 21 bp, Artificial Sequence
  Description of Artificial Sequence: Synthetic oligonucleotide
aacatgccaaacacaagccac

SEQ ID NO: 35530 - DNA, 21 bp, Artificial Sequence
  Description of Artificial Sequence: Synthetic oligonucleotide
aacatgccaagacacggactc

SEQ ID NO: 35531 - DNA, 21 bp, Artificial Sequence
  Description of Artificial Sequence: Synthetic oligonucleotide
aacatgccagtcggaagcaca

SEQ ID NO: 35532 - DNA, 21 bp, Artificial Sequence
  Description of Artificial Sequence: Synthetic oligonucleotide
aacatgcaaggaacaaaccca

SEQ ID NO: 35533 - DNA, 21 bp, Artificial Sequence
  Description of Artificial Sequence: Synthetic oligonucleotide
aacatgagagacacagcaagc

SEQ ID NO: 35534 - DNA, 21 bp, Artificial Sequence
  Description of Artificial Sequence: Synthetic oligonucleotide
aacatgagactcgaccaagga

SEQ ID NO: 35535 - DNA, 21 bp, Artificial Sequence
  Description of Artificial Sequence: Synthetic oligonucleotide
aacatgagaccacacacagga

SEQ ID NO: 35536 - DNA, 21 bp, Artificial Sequence
  Description of Artificial Sequence: Synthetic oligonucleotide
aacatgagagtcacaccacaa

SEQ ID NO: 35537 - DNA, 21 bp, Artificial Sequence
  Description of Artificial Sequence: Synthetic oligonucleotide
aacatgagcgcaaacatcaac

SEQ ID NO: 35538 - DNA, 21 bp, Artificial Sequence
  Description of Artificial Sequence: Synthetic oligonucleotide
aacatgagcaaaagcccagga

SEQ ID NO: 35539 - DNA, 21 bp, Artificial Sequence
  Description of Artificial Sequence: Synthetic oligonucleotide
aacatgagcaacgtccacaca

SEQ ID NO: 35540 - DNA, 21 bp, Artificial Sequence
  Description of Artificial Sequence: Synthetic oligonucleotide
aacatgagcagaggagcaatg

SEQ ID NO: 35541 - DNA, 21 bp, Artificial Sequence
  Description of Artificial Sequence: Synthetic oligonucleotide
aacatgtacccagtcccacca

SEQ ID NO: 35542 - DNA, 21 bp, Artificial Sequence
  Description of Artificial Sequence: Synthetic oligonucleotide
aacaacgcaaaagcaatgaca

SEQ ID NO: 35543 - DNA, 21 bp, Artificial Sequence
  Description of Artificial Sequence: Synthetic oligonucleotide
aacaacgcaagcagcagcgac

SEQ ID NO: 35544 - DNA, 21 bp, Artificial Sequence
  Description of Artificial Sequence: Synthetic oligonucleotide
aacaacgacagactcgtccac

SEQ ID NO: 35545 - DNA, 21 bp, Artificial Sequence
  Description of Artificial Sequence: Synthetic oligonucleotide
aacaacgaactcagaagcagc

SEQ ID NO: 35546 - DNA, 21 bp, Artificial Sequence
  Description of Artificial Sequence: Synthetic oligonucleotide
aacaacttcggaaacacatac

SEQ ID NO: 35547 - DNA, 21 bp, Artificial Sequence
  Description of Artificial Sequence: Synthetic oligonucleotide
aacaacggaaaaggaccagtc

SEQ ID NO: 35548 - DNA, 21 bp, Artificial Sequence
  Description of Artificial Sequence: Synthetic oligonucleotide
aacaacggactcccaagcaga

SEQ ID NO: 35549 - DNA, 21 bp, Artificial Sequence
  Description of Artificial Sequence: Synthetic oligonucleotide
aacaacggaagagcacaactc

SEQ ID NO: 35550 - DNA, 21 bp, Artificial Sequence
  Description of Artificial Sequence: Synthetic oligonucleotide
aacaacggaagactcccaaac

SEQ ID NO: 35551 - DNA, 21 bp, Artificial Sequence
  Description of Artificial Sequence: Synthetic oligonucleotide
aacaaccacaaaatccaaagc

SEQ ID NO: 35552 - DNA, 21 bp, Artificial Sequence
  Description of Artificial Sequence: Synthetic oligonucleotide
aacaacctcagactcaacctc

SEQ ID NO: 35553 - DNA, 21 bp, Artificial Sequence
  Description of Artificial Sequence: Synthetic oligonucleotide
aacaacctcagaacaagcctc

SEQ ID NO: 35554 - DNA, 21 bp, Artificial Sequence
  Description of Artificial Sequence: Synthetic oligonucleotide
aacaacatgaacacaatgcca

SEQ ID NO: 35555 - DNA, 21 bp, Artificial Sequence
  Description of Artificial Sequence: Synthetic oligonucleotide
aacaacaacgaacactacgtc

SEQ ID NO: 35556 - DNA, 21 bp, Artificial Sequence
  Description of Artificial Sequence: Synthetic oligonucleotide
aacaacaacctcgaaacaatg

SEQ ID NO: 35557 - DNA, 21 bp, Artificial Sequence
  Description of Artificial Sequence: Synthetic oligonucleotide
aacaacaacccaaaatacgga

SEQ ID NO: 35558 - DNA, 21 bp, Artificial Sequence
  Description of Artificial Sequence: Synthetic oligonucleotide
aacaacaacacaacaccactc

SEQ ID NO: 35559 - DNA, 21 bp, Artificial Sequence
  Description of Artificial Sequence: Synthetic oligonucleotide
aacaacccagcaccaccaagc

SEQ ID NO: 35560 - DNA, 21 bp, Artificial Sequence
  Description of Artificial Sequence: Synthetic oligonucleotide
aacaacccagacgcatacagc

SEQ ID NO: 35561 - DNA, 21 bp, Artificial Sequence
  Description of Artificial Sequence: Synthetic oligonucleotide
aacaacagaccagcaagagaa

SEQ ID NO: 35562 - DNA, 21 bp, Artificial Sequence
  Description of Artificial Sequence: Synthetic oligonucleotide
aacaacagcatggcactcatg

SEQ ID NO: 35563 - DNA, 21 bp, Artificial Sequence
  Description of Artificial Sequence: Synthetic oligonucleotide
aacaacagcagaatcagcagc

SEQ ID NO: 35564 - DNA, 21 bp, Artificial Sequence
  Description of Artificial Sequence: Synthetic oligonucleotide
aacaacagcagagtcggaaca

SEQ ID NO: 35565 - DNA, 21 bp, Artificial Sequence
  Description of Artificial Sequence: Synthetic oligonucleotide
aacaacagcagctacagcgaa

SEQ ID NO: 35566 - DNA, 21 bp, Artificial Sequence
  Description of Artificial Sequence: Synthetic oligonucleotide
aacaacgtcaacccaatcgca

SEQ ID NO: 35567 - DNA, 21 bp, Artificial Sequence
  Description of Artificial Sequence: Synthetic oligonucleotide
aacaacgtcagcacaatcatc

SEQ ID NO: 35568 - DNA, 21 bp, Artificial Sequence
  Description of Artificial Sequence: Synthetic oligonucleotide
aacaactggcacaacacacca

SEQ ID NO: 35569 - DNA, 21 bp, Artificial Sequence
  Description of Artificial Sequence: Synthetic oligonucleotide
aacaactacaacccaccaaca

SEQ ID NO: 35570 - DNA, 21 bp, Artificial Sequence
  Description of Artificial Sequence: Synthetic oligonucleotide
aacccagcagcaagcacacac

SEQ ID NO: 35571 - DNA, 21 bp, Artificial Sequence
  Description of Artificial Sequence: Synthetic oligonucleotide
aacccagcactcccaggacac

SEQ ID NO: 35572 - DNA, 21 bp, Artificial Sequence
  Description of Artificial Sequence: Synthetic oligonucleotide
aacccagaaggatggggactc

SEQ ID NO: 35573 - DNA, 21 bp, Artificial Sequence
  Description of Artificial Sequence: Synthetic oligonucleotide
aacccagaaacactcatcaga

SEQ ID NO: 35574 - DNA, 21 bp, Artificial Sequence
  Description of Artificial Sequence: Synthetic oligonucleotide
aacccagaagtcagcccaagc

SEQ ID NO: 35575 - DNA, 21 bp, Artificial Sequence
  Description of Artificial Sequence: Synthetic oligonucleotide
aacccaggagcaaacatgagc

SEQ ID NO: 35576 - DNA, 21 bp, Artificial Sequence
  Description of Artificial Sequence: Synthetic oligonucleotide
aacccaggaagccaaatggtc

SEQ ID NO: 35577 - DNA, 21 bp, Artificial Sequence
  Description of Artificial Sequence: Synthetic oligonucleotide
aacccaggaacaacaacaaca

SEQ ID NO: 35578 - DNA, 21 bp, Artificial Sequence
  Description of Artificial Sequence: Synthetic oligonucleotide
aacccaggagtcaaaagcgca

SEQ ID NO: 35579 - DNA, 21 bp, Artificial Sequence
  Description of Artificial Sequence: Synthetic oligonucleotide
aacccaggagtcacacacctc

SEQ ID NO: 35580 - DNA, 21 bp, Artificial Sequence
  Description of Artificial Sequence: Synthetic oligonucleotide
aacccacacatcagcgtcagc

SEQ ID NO: 35581 - DNA, 21 bp, Artificial Sequence
  Description of Artificial Sequence: Synthetic oligonucleotide
aacccacacatgcaaaacatc

SEQ ID NO: 35582 - DNA, 21 bp, Artificial Sequence
  Description of Artificial Sequence: Synthetic oligonucleotide
aacccacacaacgacacagga

SEQ ID NO: 35583 - DNA, 21 bp, Artificial Sequence
  Description of Artificial Sequence: Synthetic oligonucleotide
aacccaatcctcaaaacacaa

SEQ ID NO: 35584 - DNA, 21 bp, Artificial Sequence
  Description of Artificial Sequence: Synthetic oligonucleotide
aacccaatcagcagcggacca

SEQ ID NO: 35585 - DNA, 21 bp, Artificial Sequence
  Description of Artificial Sequence: Synthetic oligonucleotide
aacccaaaactcatgaaagaa

SEQ ID NO: 35586 - DNA, 21 bp, Artificial Sequence
  Description of Artificial Sequence: Synthetic oligonucleotide
aacccactcagcaacgacgga

SEQ ID NO: 35587 - DNA, 21 bp, Artificial Sequence
  Description of Artificial Sequence: Synthetic oligonucleotide
aacccactcacaacacacgac

SEQ ID NO: 35588 - DNA, 21 bp, Artificial Sequence
  Description of Artificial Sequence: Synthetic oligonucleotide
aacccaatgatgcacggaagc

SEQ ID NO: 35589 - DNA, 21 bp, Artificial Sequence
  Description of Artificial Sequence: Synthetic oligonucleotide
aacccaatgacaccagaccca

SEQ ID NO: 35590 - DNA, 21 bp, Artificial Sequence
  Description of Artificial Sequence: Synthetic oligonucleotide
aacccaaaccaagtcgcagaa

SEQ ID NO: 35591 - DNA, 21 bp, Artificial Sequence
  Description of Artificial Sequence: Synthetic oligonucleotide
aacccaaacacaagaaactgc

SEQ ID NO: 35592 - DNA, 21 bp, Artificial Sequence
  Description of Artificial Sequence: Synthetic oligonucleotide
aacccaccagcactcctccca

SEQ ID NO: 35593 - DNA, 21 bp, Artificial Sequence
  Description of Artificial Sequence: Synthetic oligonucleotide
aacccaccaccaccaagccca

SEQ ID NO: 35594 - DNA, 21 bp, Artificial Sequence
  Description of Artificial Sequence: Synthetic oligonucleotide
aacccaccaagatacggaagc

SEQ ID NO: 35595 - DNA, 21 bp, Artificial Sequence
  Description of Artificial Sequence: Synthetic oligonucleotide
aacccaccaagcctcagcagc

SEQ ID NO: 35596 - DNA, 21 bp, Artificial Sequence
  Description of Artificial Sequence: Synthetic oligonucleotide
aacccaccaagcagaggaaac

SEQ ID NO: 35597 - DNA, 21 bp, Artificial Sequence
  Description of Artificial Sequence: Synthetic oligonucleotide
aacccaccatacgcactcgca

SEQ ID NO: 35598 - DNA, 21 bp, Artificial Sequence
  Description of Artificial Sequence: Synthetic oligonucleotide
aacccacaaatgccaagccca

SEQ ID NO: 35599 - DNA, 21 bp, Artificial Sequence
  Description of Artificial Sequence: Synthetic oligonucleotide
aacccacaaagactcggacaa

SEQ ID NO: 35600 - DNA, 21 bp, Artificial Sequence
  Description of Artificial Sequence: Synthetic oligonucleotide
aacccacaaagcgtcacacac

SEQ ID NO: 35601 - DNA, 21 bp, Artificial Sequence
  Description of Artificial Sequence: Synthetic oligonucleotide
aacccaagagcacaaatgagc

SEQ ID NO: 35602 - DNA, 21 bp, Artificial Sequence
  Description of Artificial Sequence: Synthetic oligonucleotide
aacccaagagcaagcagctgg

SEQ ID NO: 35603 - DNA, 21 bp, Artificial Sequence
  Description of Artificial Sequence: Synthetic oligonucleotide
aacccaagaaacccaacactc

SEQ ID NO: 35604 - DNA, 21 bp, Artificial Sequence
  Description of Artificial Sequence: Synthetic oligonucleotide
aacccaagaccaggacaagtc

SEQ ID NO: 35605 - DNA, 21 bp, Artificial Sequence
  Description of Artificial Sequence: Synthetic oligonucleotide
aacccaagcggaaaagtcgca

SEQ ID NO: 35606 - DNA, 21 bp, Artificial Sequence
  Description of Artificial Sequence: Synthetic oligonucleotide
aacccaagcctccaaacaaca

SEQ ID NO: 35607 - DNA, 21 bp, Artificial Sequence
  Description of Artificial Sequence: Synthetic oligonucleotide
aacccaagcctcagaatcgga

SEQ ID NO: 35608 - DNA, 21 bp, Artificial Sequence
  Description of Artificial Sequence: Synthetic oligonucleotide
aacccaagcaaccacgcactc

SEQ ID NO: 35609 - DNA, 21 bp, Artificial Sequence
  Description of Artificial Sequence: Synthetic oligonucleotide
aacccaagccaattcgacttc

SEQ ID NO: 35610 - DNA, 21 bp, Artificial Sequence
  Description of Artificial Sequence: Synthetic oligonucleotide
aacccaagcagactcccacaa

SEQ ID NO: 35611 - DNA, 21 bp, Artificial Sequence
  Description of Artificial Sequence: Synthetic oligonucleotide
aacccaagcagacaagcacca

SEQ ID NO: 35612 - DNA, 21 bp, Artificial Sequence
  Description of Artificial Sequence: Synthetic oligonucleotide
aacccaagcagcagcggatgc

SEQ ID NO: 35613 - DNA, 21 bp, Artificial Sequence
  Description of Artificial Sequence: Synthetic oligonucleotide
aacccaagcgtcgtcacagca

SEQ ID NO: 35614 - DNA, 21 bp, Artificial Sequence
  Description of Artificial Sequence: Synthetic oligonucleotide
aacccaacagcaagcaacgca

SEQ ID NO: 35615 - DNA, 21 bp, Artificial Sequence
  Description of Artificial Sequence: Synthetic oligonucleotide
aacccaacattccacggaagc

SEQ ID NO: 35616 - DNA, 21 bp, Artificial Sequence
  Description of Artificial Sequence: Synthetic oligonucleotide
aacccaacacaaccaatcaaa

SEQ ID NO: 35617 - DNA, 21 bp, Artificial Sequence
  Description of Artificial Sequence: Synthetic oligonucleotide
aacccaacaagcctcccaagc

SEQ ID NO: 35618 - DNA, 21 bp, Artificial Sequence
  Description of Artificial Sequence: Synthetic oligonucleotide
aacccaacaacaagatacatg

SEQ ID NO: 35619 - DNA, 21 bp, Artificial Sequence
  Description of Artificial Sequence: Synthetic oligonucleotide
aacccaacagtcacaggaagc

SEQ ID NO: 35620 - DNA, 21 bp, Artificial Sequence
  Description of Artificial Sequence: Synthetic oligonucleotide
aacccatacaacacagaagca

SEQ ID NO: 35621 - DNA, 21 bp, Artificial Sequence
  Description of Artificial Sequence: Synthetic oligonucleotide
aacccatacgtcctcagagca

SEQ ID NO: 35622 - DNA, 21 bp, Artificial Sequence
  Description of Artificial Sequence: Synthetic oligonucleotide
aaccaagacaaagcaacacac

SEQ ID NO: 35623 - DNA, 21 bp, Artificial Sequence
  Description of Artificial Sequence: Synthetic oligonucleotide
aaccaagacccatacatgtac

SEQ ID NO: 35624 - DNA, 21 bp, Artificial Sequence
  Description of Artificial Sequence: Synthetic oligonucleotide
aaccaagaaggaagcccaatc

SEQ ID NO: 35625 - DNA, 21 bp, Artificial Sequence
  Description of Artificial Sequence: Synthetic oligonucleotide
aaccaagaaaacaaaatcgga

SEQ ID NO: 35626 - DNA, 21 bp, Artificial Sequence
  Description of Artificial Sequence: Synthetic oligonucleotide
aaccaaggacaaaacccagtc

SEQ ID NO: 35627 - DNA, 21 bp, Artificial Sequence
  Description of Artificial Sequence: Synthetic oligonucleotide
aaccaaatcgcagtcagcaga

SEQ ID NO: 35628 - DNA, 21 bp, Artificial Sequence
  Description of Artificial Sequence: Synthetic oligonucleotide
aaccaactccacccagtcaga

SEQ ID NO: 35629 - DNA, 21 bp, Artificial Sequence
  Description of Artificial Sequence: Synthetic oligonucleotide
aaccaactcgtcgcacacgca

SEQ ID NO: 35630 - DNA, 21 bp, Artificial Sequence
  Description of Artificial Sequence: Synthetic oligonucleotide
aaccaaaactaccaaatcgtc

SEQ ID NO: 35631 - DNA, 21 bp, Artificial Sequence
  Description of Artificial Sequence: Synthetic oligonucleotide
aaccaacaaggaagcatggca

SEQ ID NO: 35632 - DNA, 21 bp, Artificial Sequence
  Description of Artificial Sequence: Synthetic oligonucleotide
aaccaaagagacacaatgaca

SEQ ID NO: 35633 - DNA, 21 bp, Artificial Sequence
  Description of Artificial Sequence: Synthetic oligonucleotide
aaccaaagaccagtcaacttc

SEQ ID NO: 35634 - DNA, 21 bp, Artificial Sequence
  Description of Artificial Sequence: Synthetic oligonucleotide
aaccaaagaagcacaagcatg

SEQ ID NO: 35635 - DNA, 21 bp, Artificial Sequence
  Description of Artificial Sequence: Synthetic oligonucleotide
aaccaaagcatccaccaaaca

SEQ ID NO: 35636 - DNA, 21 bp, Artificial Sequence
  Description of Artificial Sequence: Synthetic oligonucleotide
aaccaaacagcatgcgaagtc

SEQ ID NO: 35637 - DNA, 21 bp, Artificial Sequence
  Description of Artificial Sequence: Synthetic oligonucleotide
aaccaaacactcatggcaagc

SEQ ID NO: 35638 - DNA, 21 bp, Artificial Sequence
  Description of Artificial Sequence: Synthetic oligonucleotide
aaccaaacaaacggaagagca

SEQ ID NO: 35639 - DNA, 21 bp, Artificial Sequence
  Description of Artificial Sequence: Synthetic oligonucleotide
aaccaaacaagagtcgtccca

SEQ ID NO: 35640 - DNA, 21 bp, Artificial Sequence
  Description of Artificial Sequence: Synthetic oligonucleotide
aaccaatacccaagagaccca

SEQ ID NO: 35641 - DNA, 21 bp, Artificial Sequence
  Description of Artificial Sequence: Synthetic oligonucleotide
aacagagcagaaagcctcctc

SEQ ID NO: 35642 - DNA, 21 bp, Artificial Sequence
  Description of Artificial Sequence: Synthetic oligonucleotide
aacagagcaccaccactcagc

SEQ ID NO: 35643 - DNA, 21 bp, Artificial Sequence
  Description of Artificial Sequence: Synthetic oligonucleotide
aacagagacatcgcaggaaga

SEQ ID NO: 35644 - DNA, 21 bp, Artificial Sequence
  Description of Artificial Sequence: Synthetic oligonucleotide
aacagagacatcctcagcagc

SEQ ID NO: 35645 - DNA, 21 bp, Artificial Sequence
  Description of Artificial Sequence: Synthetic oligonucleotide
aacagagacgtcccagaaagc

SEQ ID NO: 35646 - DNA, 21 bp, Artificial Sequence
  Description of Artificial Sequence: Synthetic oligonucleotide
aacagagactacagcacagca

SEQ ID NO: 35647 - DNA, 21 bp, Artificial Sequence
  Description of Artificial Sequence: Synthetic oligonucleotide
aacagagactacagcgtcgac

SEQ ID NO: 35648 - DNA, 21 bp, Artificial Sequence
  Description of Artificial Sequence: Synthetic oligonucleotide
aacagagactacacaagccca

SEQ ID NO: 35649 - DNA, 21 bp, Artificial Sequence
  Description of Artificial Sequence: Synthetic oligonucleotide
aacagagaaccaggactcaac

SEQ ID NO: 35650 - DNA, 21 bp, Artificial Sequence
  Description of Artificial Sequence: Synthetic oligonucleotide
aacagagaaagagcaatgaca

SEQ ID NO: 35651 - DNA, 21 bp, Artificial Sequence
  Description of Artificial Sequence: Synthetic oligonucleotide
aacagagaaagctacagcctc

SEQ ID NO: 35652 - DNA, 21 bp, Artificial Sequence
  Description of Artificial Sequence: Synthetic oligonucleotide
aacagattcccacacgtcgac

SEQ ID NO: 35653 - DNA, 21 bp, Artificial Sequence
  Description of Artificial Sequence: Synthetic oligonucleotide
aacagaggacacctcgacagc

SEQ ID NO: 35654 - DNA, 21 bp, Artificial Sequence
  Description of Artificial Sequence: Synthetic oligonucleotide
aacagaggactcgtcgcagca

SEQ ID NO: 35655 - DNA, 21 bp, Artificial Sequence
  Description of Artificial Sequence: Synthetic oligonucleotide
aacagaggaaacttcgacaga

SEQ ID NO: 35656 - DNA, 21 bp, Artificial Sequence
  Description of Artificial Sequence: Synthetic oligonucleotide
aacagaggaccaagcaacaca

SEQ ID NO: 35657 - DNA, 21 bp, Artificial Sequence
  Description of Artificial Sequence: Synthetic oligonucleotide
aacagaggacaaacagcacaa

SEQ ID NO: 35658 - DNA, 21 bp, Artificial Sequence
  Description of Artificial Sequence: Synthetic oligonucleotide
aacagaggaacactcctcagc

SEQ ID NO: 35659 - DNA, 21 bp, Artificial Sequence
  Description of Artificial Sequence: Synthetic oligonucleotide
aacagaatcgcagcagaagca

SEQ ID NO: 35660 - DNA, 21 bp, Artificial Sequence
  Description of Artificial Sequence: Synthetic oligonucleotide
aacagaatcatgccaatcagc

SEQ ID NO: 35661 - DNA, 21 bp, Artificial Sequence
  Description of Artificial Sequence: Synthetic oligonucleotide
aacagaatcagcgcacaacac

SEQ ID NO: 35662 - DNA, 21 bp, Artificial Sequence
  Description of Artificial Sequence: Synthetic oligonucleotide
aacagaatcagcagcttccca

SEQ ID NO: 35663 - DNA, 21 bp, Artificial Sequence
  Description of Artificial Sequence: Synthetic oligonucleotide
aacagaaaagcactcagcgaa

SEQ ID NO: 35664 - DNA, 21 bp, Artificial Sequence
  Description of Artificial Sequence: Synthetic oligonucleotide
aacagaaaaccaacaatggac

SEQ ID NO: 35665 - DNA, 21 bp, Artificial Sequence
  Description of Artificial Sequence: Synthetic oligonucleotide
aacagactcctcggatacgga

SEQ ID NO: 35666 - DNA, 21 bp, Artificial Sequence
  Description of Artificial Sequence: Synthetic oligonucleotide
aacagaatgccaagcgcagca

SEQ ID NO: 35667 - DNA, 21 bp, Artificial Sequence
  Description of Artificial Sequence: Synthetic oligonucleotide
aacagaatgagcggaagcgac

SEQ ID NO: 35668 - DNA, 21 bp, Artificial Sequence
  Description of Artificial Sequence: Synthetic oligonucleotide
aacagaaacctcgacaacgga

SEQ ID NO: 35669 - DNA, 21 bp, Artificial Sequence
  Description of Artificial Sequence: Synthetic oligonucleotide
aacagaccaatggaactcctc

SEQ ID NO: 35670 - DNA, 21 bp, Artificial Sequence
  Description of Artificial Sequence: Synthetic oligonucleotide
aacagaccacaacacgcagtc

SEQ ID NO: 35671 - DNA, 21 bp, Artificial Sequence
  Description of Artificial Sequence: Synthetic oligonucleotide
aacagacaagacgtcccaagc

SEQ ID NO: 35672 - DNA, 21 bp, Artificial Sequence
  Description of Artificial Sequence: Synthetic oligonucleotide
aacagacaaggaaacgaactc

SEQ ID NO: 35673 - DNA, 21 bp, Artificial Sequence
  Description of Artificial Sequence: Synthetic oligonucleotide
aacagacaaccactcatgaca

SEQ ID NO: 35674 - DNA, 21 bp, Artificial Sequence
  Description of Artificial Sequence: Synthetic oligonucleotide
aacagacaaccaccaagagaa

SEQ ID NO: 35675 - DNA, 21 bp, Artificial Sequence
  Description of Artificial Sequence: Synthetic oligonucleotide
aacagacaaagcctcccactc

SEQ ID NO: 35676 - DNA, 21 bp, Artificial Sequence
  Description of Artificial Sequence: Synthetic oligonucleotide
aacagacaaacaatcgcactc

SEQ ID NO: 35677 - DNA, 21 bp, Artificial Sequence
  Description of Artificial Sequence: Synthetic oligonucleotide
aacagaagaacaaacgaagac

SEQ ID NO: 35678 - DNA, 21 bp, Artificial Sequence
  Description of Artificial Sequence: Synthetic oligonucleotide
aacagaagcgcagaatgctgg

SEQ ID NO: 35679 - DNA, 21 bp, Artificial Sequence
  Description of Artificial Sequence: Synthetic oligonucleotide
aacagaagcgcactcacacca

SEQ ID NO: 35680 - DNA, 21 bp, Artificial Sequence
  Description of Artificial Sequence: Synthetic oligonucleotide
aacagaagcgcaagagaccca

SEQ ID NO: 35681 - DNA, 21 bp, Artificial Sequence
  Description of Artificial Sequence: Synthetic oligonucleotide
aacagaagcgaaatggtcgaa

SEQ ID NO: 35682 - DNA, 21 bp, Artificial Sequence
  Description of Artificial Sequence: Synthetic oligonucleotide
aacagaagcggactcgtcagc

SEQ ID NO: 35683 - DNA, 21 bp, Artificial Sequence
  Description of Artificial Sequence: Synthetic oligonucleotide
aacagaagcatcacacacgac

SEQ ID NO: 35684 - DNA, 21 bp, Artificial Sequence
  Description of Artificial Sequence: Synthetic oligonucleotide
aacagaagcctcgcaacagtc

SEQ ID NO: 35685 - DNA, 21 bp, Artificial Sequence
  Description of Artificial Sequence: Synthetic oligonucleotide
aacagaagcgtcctcagcgac

SEQ ID NO: 35686 - DNA, 21 bp, Artificial Sequence
  Description of Artificial Sequence: Synthetic oligonucleotide
aacagaagctacgacagccca

SEQ ID NO: 35687 - DNA, 21 bp, Artificial Sequence
  Description of Artificial Sequence: Synthetic oligonucleotide
aacagaacactcgacatgagc

SEQ ID NO: 35688 - DNA, 21 bp, Artificial Sequence
  Description of Artificial Sequence: Synthetic oligonucleotide
aacagaacactcccaacaagc

SEQ ID NO: 35689 - DNA, 21 bp, Artificial Sequence
  Description of Artificial Sequence: Synthetic oligonucleotide
aacagaacactctacccagca

SEQ ID NO: 35690 - DNA, 21 bp, Artificial Sequence
  Description of Artificial Sequence: Synthetic oligonucleotide
aacagaacacaacaaagcagc

SEQ ID NO: 35691 - DNA, 21 bp, Artificial Sequence
  Description of Artificial Sequence: Synthetic oligonucleotide
aacagaacacaaagcatcagc

SEQ ID NO: 35692 - DNA, 21 bp, Artificial Sequence
  Description of Artificial Sequence: Synthetic oligonucleotide
aacagaacaacactcatgagc

SEQ ID NO: 35693 - DNA, 21 bp, Artificial Sequence
  Description of Artificial Sequence: Synthetic oligonucleotide
aacagagtcggagaaacaaga

SEQ ID NO: 35694 - DNA, 21 bp, Artificial Sequence
  Description of Artificial Sequence: Synthetic oligonucleotide
aacagagtcggaatcgcacca

SEQ ID NO: 35695 - DNA, 21 bp, Artificial Sequence
  Description of Artificial Sequence: Synthetic oligonucleotide
aacagagtcgtcttcgaagga

SEQ ID NO: 35696 - DNA, 21 bp, Artificial Sequence
  Description of Artificial Sequence: Synthetic oligonucleotide
aacagatacgacgcaagcgac

SEQ ID NO: 35697 - DNA, 21 bp, Artificial Sequence
  Description of Artificial Sequence: Synthetic oligonucleotide
aacagcgcagcaagaatccac

SEQ ID NO: 35698 - DNA, 21 bp, Artificial Sequence
  Description of Artificial Sequence: Synthetic oligonucleotide
aacagcgcagacagcagccca

SEQ ID NO: 35699 - DNA, 21 bp, Artificial Sequence
  Description of Artificial Sequence: Synthetic oligonucleotide
aacagcgcaatgcacggaaca

SEQ ID NO: 35700 - DNA, 21 bp, Artificial Sequence
  Description of Artificial Sequence: Synthetic oligonucleotide
aacagcgcaagcgaattcgtc

SEQ ID NO: 35701 - DNA, 21 bp, Artificial Sequence
  Description of Artificial Sequence: Synthetic oligonucleotide
aacagcgcaagcgaaatgaca

SEQ ID NO: 35702 - DNA, 21 bp, Artificial Sequence
  Description of Artificial Sequence: Synthetic oligonucleotide
aacagcgcaagcacattccaa

SEQ ID NO: 35703 - DNA, 21 bp, Artificial Sequence
  Description of Artificial Sequence: Synthetic oligonucleotide
aacagcgcaagcacattcaca

SEQ ID NO: 35704 - DNA, 21 bp, Artificial Sequence
  Description of Artificial Sequence: Synthetic oligonucleotide
aacagcgcagtcatgacaaga

SEQ ID NO: 35705 - DNA, 21 bp, Artificial Sequence
  Description of Artificial Sequence: Synthetic oligonucleotide
aacagcgcatacccagtccac

SEQ ID NO: 35706 - DNA, 21 bp, Artificial Sequence
  Description of Artificial Sequence: Synthetic oligonucleotide
aacagcgacttcagcctcgca

SEQ ID NO: 35707 - DNA, 21 bp, Artificial Sequence
  Description of Artificial Sequence: Synthetic oligonucleotide
aacagcgacctccacaaacca

SEQ ID NO: 35708 - DNA, 21 bp, Artificial Sequence
  Description of Artificial Sequence: Synthetic oligonucleotide
aacagcgacagcagaacacca

SEQ ID NO: 35709 - DNA, 21 bp, Artificial Sequence
  Description of Artificial Sequence: Synthetic oligonucleotide
aacagcgacagcagcatcaga

SEQ ID NO: 35710 - DNA, 21 bp, Artificial Sequence
  Description of Artificial Sequence: Synthetic oligonucleotide
aacagcggactcgaactcctc

SEQ ID NO: 35711 - DNA, 21 bp, Artificial Sequence
  Description of Artificial Sequence: Synthetic oligonucleotide
aacagcggaaacagcacacca

SEQ ID NO: 35712 - DNA, 21 bp, Artificial Sequence
  Description of Artificial Sequence: Synthetic oligonucleotide
aacagcggaagagcacacatc

SEQ ID NO: 35713 - DNA, 21 bp, Artificial Sequence
  Description of Artificial Sequence: Synthetic oligonucleotide
aacagccacgcacaccacgac

SEQ ID NO: 35714 - DNA, 21 bp, Artificial Sequence
  Description of Artificial Sequence: Synthetic oligonucleotide
aacagccacaacctcacactc

SEQ ID NO: 35715 - DNA, 21 bp, Artificial Sequence
  Description of Artificial Sequence: Synthetic oligonucleotide
aacagccacccacaaacaaga

SEQ ID NO: 35716 - DNA, 21 bp, Artificial Sequence
  Description of Artificial Sequence: Synthetic oligonucleotide
aacagccacagcagcccagca

SEQ ID NO: 35717 - DNA, 21 bp, Artificial Sequence
  Description of Artificial Sequence: Synthetic oligonucleotide
aacagccacagcgtcagcaca

SEQ ID NO: 35718 - DNA, 21 bp, Artificial Sequence
  Description of Artificial Sequence: Synthetic oligonucleotide
aacagcatcccagaaagattc

SEQ ID NO: 35719 - DNA, 21 bp, Artificial Sequence
  Description of Artificial Sequence: Synthetic oligonucleotide
aacagcatcagactcagcgga

SEQ ID NO: 35720 - DNA, 21 bp, Artificial Sequence
  Description of Artificial Sequence: Synthetic oligonucleotide
aacagcaaaatgccaagagca

SEQ ID NO: 35721 - DNA, 21 bp, Artificial Sequence
  Description of Artificial Sequence: Synthetic oligonucleotide
aacagcaaatacacaccaatg

SEQ ID NO: 35722 - DNA, 21 bp, Artificial Sequence
  Description of Artificial Sequence: Synthetic oligonucleotide
aacagcctcgcagcaagaaac

SEQ ID NO: 35723 - DNA, 21 bp, Artificial Sequence
  Description of Artificial Sequence: Synthetic oligonucleotide
aacagcctcgcaagaaaagaa

SEQ ID NO: 35724 - DNA, 21 bp, Artificial Sequence
  Description of Artificial Sequence: Synthetic oligonucleotide
aacagcctcaacgacagagca

SEQ ID NO: 35725 - DNA, 21 bp, Artificial Sequence
  Description of Artificial Sequence: Synthetic oligonucleotide
aacagcctcaacccaggactc

SEQ ID NO: 35726 - DNA, 21 bp, Artificial Sequence
  Description of Artificial Sequence: Synthetic oligonucleotide
aacagcctcccagacagcgtc

SEQ ID NO: 35727 - DNA, 21 bp, Artificial Sequence
  Description of Artificial Sequence: Synthetic oligonucleotide
aacagcctcccaatggcaagc

SEQ ID NO: 35728 - DNA, 21 bp, Artificial Sequence
  Description of Artificial Sequence: Synthetic oligonucleotide
aacagcatgcaatacagcgca

SEQ ID NO: 35729 - DNA, 21 bp, Artificial Sequence
  Description of Artificial Sequence: Synthetic oligonucleotide
aacagcaacgcagcaagcgga

SEQ ID NO: 35730 - DNA, 21 bp, Artificial Sequence
  Description of Artificial Sequence: Synthetic oligonucleotide
aacagcaaccacgaaagatac

SEQ ID NO: 35731 - DNA, 21 bp, Artificial Sequence
  Description of Artificial Sequence: Synthetic oligonucleotide
aacagcaacacaccaggaatg

SEQ ID NO: 35732 - DNA, 21 bp, Artificial Sequence
  Description of Artificial Sequence: Synthetic oligonucleotide
aacagcaacgtcagcccagga

SEQ ID NO: 35733 - DNA, 21 bp, Artificial Sequence
  Description of Artificial Sequence: Synthetic oligonucleotide
aacagcccaatcttcgtcgga

SEQ ID NO: 35734 - DNA, 21 bp, Artificial Sequence
  Description of Artificial Sequence: Synthetic oligonucleotide
aacagcccaaacgaaagaaca

SEQ ID NO: 35735 - DNA, 21 bp, Artificial Sequence
  Description of Artificial Sequence: Synthetic oligonucleotide
aacagcccaaaccaactcgga

SEQ ID NO: 35736 - DNA, 21 bp, Artificial Sequence
  Description of Artificial Sequence: Synthetic oligonucleotide
aacagcccaagacacgtcgca

SEQ ID NO: 35737 - DNA, 21 bp, Artificial Sequence
  Description of Artificial Sequence: Synthetic oligonucleotide
aacagcccaagccacagccca

SEQ ID NO: 35738 - DNA, 21 bp, Artificial Sequence
  Description of Artificial Sequence: Synthetic oligonucleotide
aacagcccaacagtccaactc

SEQ ID NO: 35739 - DNA, 21 bp, Artificial Sequence
  Description of Artificial Sequence: Synthetic oligonucleotide
aacagcccagtcgtcagcaga

SEQ ID NO: 35740 - DNA, 21 bp, Artificial Sequence
  Description of Artificial Sequence: Synthetic oligonucleotide
aacagccaacacagcacaaca

SEQ ID NO: 35741 - DNA, 21 bp, Artificial Sequence
  Description of Artificial Sequence: Synthetic oligonucleotide
aacagccaactccaaagcagc

SEQ ID NO: 35742 - DNA, 21 bp, Artificial Sequence
  Description of Artificial Sequence: Synthetic oligonucleotide
aacagccaaagatacctcagc

SEQ ID NO: 35743 - DNA, 21 bp, Artificial Sequence
  Description of Artificial Sequence: Synthetic oligonucleotide
aacagccaaagcgcaacacca

SEQ ID NO: 35744 - DNA, 21 bp, Artificial Sequence
  Description of Artificial Sequence: Synthetic oligonucleotide
aacagcagagcagtcctcgtc

SEQ ID NO: 35745 - DNA, 21 bp, Artificial Sequence
  Description of Artificial Sequence: Synthetic oligonucleotide
aacagcagagacctcctcaca

SEQ ID NO: 35746 - DNA, 21 bp, Artificial Sequence
  Description of Artificial Sequence: Synthetic oligonucleotide
aacagcagaggagcaagcctc

SEQ ID NO: 35747 - DNA, 21 bp, Artificial Sequence
  Description of Artificial Sequence: Synthetic oligonucleotide
aacagcagaggactcggacac

SEQ ID NO: 35748 - DNA, 21 bp, Artificial Sequence
  Description of Artificial Sequence: Synthetic oligonucleotide
aacagcagaggaatgccagac

SEQ ID NO: 35749 - DNA, 21 bp, Artificial Sequence
  Description of Artificial Sequence: Synthetic oligonucleotide
aacagcagaggaccagtcgca

SEQ ID NO: 35750 - DNA, 21 bp, Artificial Sequence
  Description of Artificial Sequence: Synthetic oligonucleotide
aacagcagactcgtcacaagc

SEQ ID NO: 35751 - DNA, 21 bp, Artificial Sequence
  Description of Artificial Sequence: Synthetic oligonucleotide
aacagcagaagcaacgaaagc

SEQ ID NO: 35752 - DNA, 21 bp, Artificial Sequence
  Description of Artificial Sequence: Synthetic oligonucleotide
aacagcagaagcacaccaaac

SEQ ID NO: 35753 - DNA, 21 bp, Artificial Sequence
  Description of Artificial Sequence: Synthetic oligonucleotide
aacagcagaacagcacacgaa

SEQ ID NO: 35754 - DNA, 21 bp, Artificial Sequence
  Description of Artificial Sequence: Synthetic oligonucleotide
aacagcagaacagtccaaatc

SEQ ID NO: 35755 - DNA, 21 bp, Artificial Sequence
  Description of Artificial Sequence: Synthetic oligonucleotide
aacagcagagtcgtcggattc

SEQ ID NO: 35756 - DNA, 21 bp, Artificial Sequence
  Description of Artificial Sequence: Synthetic oligonucleotide
aacagcagcgaatggccagac

SEQ ID NO: 35757 - DNA, 21 bp, Artificial Sequence
  Description of Artificial Sequence: Synthetic oligonucleotide
aacagcagcggaaaaacacca

SEQ ID NO: 35758 - DNA, 21 bp, Artificial Sequence
  Description of Artificial Sequence: Synthetic oligonucleotide
aacagcagcatcagaaacgca

SEQ ID NO: 35759 - DNA, 21 bp, Artificial Sequence
  Description of Artificial Sequence: Synthetic oligonucleotide
aacagcagcctcaaactcaac

SEQ ID NO: 35760 - DNA, 21 bp, Artificial Sequence
  Description of Artificial Sequence: Synthetic oligonucleotide
aacagcagcatgagaatcaac

SEQ ID NO: 35761 - DNA, 21 bp, Artificial Sequence
  Description of Artificial Sequence: Synthetic oligonucleotide
aacagcagcatgagcagcgga

SEQ ID NO: 35762 - DNA, 21 bp, Artificial Sequence
  Description of Artificial Sequence: Synthetic oligonucleotide
aacagcagcccaagcctcgca

SEQ ID NO: 35763 - DNA, 21 bp, Artificial Sequence
  Description of Artificial Sequence: Synthetic oligonucleotide
aacagcagccaagtccacctc

SEQ ID NO: 35764 - DNA, 21 bp, Artificial Sequence
  Description of Artificial Sequence: Synthetic oligonucleotide
aacagcagcagcacaccaatc

SEQ ID NO: 35765 - DNA, 21 bp, Artificial Sequence
  Description of Artificial Sequence: Synthetic oligonucleotide
aacagcacaaaactcctcgac

SEQ ID NO: 35766 - DNA, 21 bp, Artificial Sequence
  Description of Artificial Sequence: Synthetic oligonucleotide
aacagcacactcgaaggaaga

SEQ ID NO: 35767 - DNA, 21 bp, Artificial Sequence
  Description of Artificial Sequence: Synthetic oligonucleotide
aacagcacactcacagtccac

SEQ ID NO: 35768 - DNA, 21 bp, Artificial Sequence
  Description of Artificial Sequence: Synthetic oligonucleotide
aacagcacaaacttcagaaca

SEQ ID NO: 35769 - DNA, 21 bp, Artificial Sequence
  Description of Artificial Sequence: Synthetic oligonucleotide
aacagcacaccacaaccacaa

SEQ ID NO: 35770 - DNA, 21 bp, Artificial Sequence
  Description of Artificial Sequence: Synthetic oligonucleotide
aacagcacaagcacatacgga

SEQ ID NO: 35771 - DNA, 21 bp, Artificial Sequence
  Description of Artificial Sequence: Synthetic oligonucleotide
aacagcgtcaaaggagtcgtc

SEQ ID NO: 35772 - DNA, 21 bp, Artificial Sequence
  Description of Artificial Sequence: Synthetic oligonucleotide
aacagcgtcagacacaacagc

SEQ ID NO: 35773 - DNA, 21 bp, Artificial Sequence
  Description of Artificial Sequence: Synthetic oligonucleotide
aacagcgtcagcggagtcaca

SEQ ID NO: 35774 - DNA, 21 bp, Artificial Sequence
  Description of Artificial Sequence: Synthetic oligonucleotide
aacagcgtcagccaaatgtac

SEQ ID NO: 35775 - DNA, 21 bp, Artificial Sequence
  Description of Artificial Sequence: Synthetic oligonucleotide
aacagcgtctacgacagaagc

SEQ ID NO: 35776 - DNA, 21 bp, Artificial Sequence
  Description of Artificial Sequence: Synthetic oligonucleotide
aacagctaccaagtcagcaga

SEQ ID NO: 35777 - DNA, 21 bp, Artificial Sequence
  Description of Artificial Sequence: Synthetic oligonucleotide
aacacagcaggaaaaccaagc

SEQ ID NO: 35778 - DNA, 21 bp, Artificial Sequence
  Description of Artificial Sequence: Synthetic oligonucleotide
aacacagcaagagaaagaagc

SEQ ID NO: 35779 - DNA, 21 bp, Artificial Sequence
  Description of Artificial Sequence: Synthetic oligonucleotide
aacacagcaagaacaagcctc

SEQ ID NO: 35780 - DNA, 21 bp, Artificial Sequence
  Description of Artificial Sequence: Synthetic oligonucleotide
aacacagacggagacagactc

SEQ ID NO: 35781 - DNA, 21 bp, Artificial Sequence
  Description of Artificial Sequence: Synthetic oligonucleotide
aacacagaagacgtccacatg

SEQ ID NO: 35782 - DNA, 21 bp, Artificial Sequence
  Description of Artificial Sequence: Synthetic oligonucleotide
aacacagaacacaacagaagc

SEQ ID NO: 35783 - DNA, 21 bp, Artificial Sequence
  Description of Artificial Sequence: Synthetic oligonucleotide
aacacagaaacaccactcgca

SEQ ID NO: 35784 - DNA, 21 bp, Artificial Sequence
  Description of Artificial Sequence: Synthetic oligonucleotide
aacacattcagcaacagcagc

SEQ ID NO: 35785 - DNA, 21 bp, Artificial Sequence
  Description of Artificial Sequence: Synthetic oligonucleotide
aacacaggaccaggaatggca

SEQ ID NO: 35786 - DNA, 21 bp, Artificial Sequence
  Description of Artificial Sequence: Synthetic oligonucleotide
aacacacacggagcagcacaa

SEQ ID NO: 35787 - DNA, 21 bp, Artificial Sequence
  Description of Artificial Sequence: Synthetic oligonucleotide
aacacacacccaacaccattc

SEQ ID NO: 35788 - DNA, 21 bp, Artificial Sequence
  Description of Artificial Sequence: Synthetic oligonucleotide
aacacacacacaaaaatgagc

SEQ ID NO: 35789 - DNA, 21 bp, Artificial Sequence
  Description of Artificial Sequence: Synthetic oligonucleotide
aacacacacgtcgaagactgg

SEQ ID NO: 35790 - DNA, 21 bp, Artificial Sequence
  Description of Artificial Sequence: Synthetic oligonucleotide
aacacaatcccaaacgtcaaa

SEQ ID NO: 35791 - DNA, 21 bp, Artificial Sequence
  Description of Artificial Sequence: Synthetic oligonucleotide
aacacaatcagagacagcatc

SEQ ID NO: 35792 - DNA, 21 bp, Artificial Sequence
  Description of Artificial Sequence: Synthetic oligonucleotide
aacacaatcagcggaagcaga

SEQ ID NO: 35793 - DNA, 21 bp, Artificial Sequence
  Description of Artificial Sequence: Synthetic oligonucleotide
aacacaaaactcacaaacaac

SEQ ID NO: 35794 - DNA, 21 bp, Artificial Sequence
  Description of Artificial Sequence: Synthetic oligonucleotide
aacacaaaaaacaacaacctc

SEQ ID NO: 35795 - DNA, 21 bp, Artificial Sequence
  Description of Artificial Sequence: Synthetic oligonucleotide
aacacaaaaagcgacccagca

SEQ ID NO: 35796 - DNA, 21 bp, Artificial Sequence
  Description of Artificial Sequence: Synthetic oligonucleotide
aacacaaaaagcccattcagc

SEQ ID NO: 35797 - DNA, 21 bp, Artificial Sequence
  Description of Artificial Sequence: Synthetic oligonucleotide
aacacactcggagaaacactc

SEQ ID NO: 35798 - DNA, 21 bp, Artificial Sequence
  Description of Artificial Sequence: Synthetic oligonucleotide
aacacactcaaactcagccaa

SEQ ID NO: 35799 - DNA, 21 bp, Artificial Sequence
  Description of Artificial Sequence: Synthetic oligonucleotide
aacacactccaaagctaccca

SEQ ID NO: 35800 - DNA, 21 bp, Artificial Sequence
  Description of Artificial Sequence: Synthetic oligonucleotide
aacacaaacatcccaagaagc

SEQ ID NO: 35801 - DNA, 21 bp, Artificial Sequence
  Description of Artificial Sequence: Synthetic oligonucleotide
aacacaaacgtcgaaagcaga

SEQ ID NO: 35802 - DNA, 21 bp, Artificial Sequence
  Description of Artificial Sequence: Synthetic oligonucleotide
aacacaaacgtcagcgtcagc

SEQ ID NO: 35803 - DNA, 21 bp, Artificial Sequence
  Description of Artificial Sequence: Synthetic oligonucleotide
aacacaccaagagtcctcagc

SEQ ID NO: 35804 - DNA, 21 bp, Artificial Sequence
  Description of Artificial Sequence: Synthetic oligonucleotide
aacacaccaagcacaagacaa

SEQ ID NO: 35805 - DNA, 21 bp, Artificial Sequence
  Description of Artificial Sequence: Synthetic oligonucleotide
aacacaagaggaggaagcagc

SEQ ID NO: 35806 - DNA, 21 bp, Artificial Sequence
  Description of Artificial Sequence: Synthetic oligonucleotide
aacacaagacacgacgtcagc

SEQ ID NO: 35807 - DNA, 21 bp, Artificial Sequence
  Description of Artificial Sequence: Synthetic oligonucleotide
aacacaagaaacgacccacca

SEQ ID NO: 35808 - DNA, 21 bp, Artificial Sequence
  Description of Artificial Sequence: Synthetic oligonucleotide
aacacaagacaactcgtcagc

SEQ ID NO: 35809 - DNA, 21 bp, Artificial Sequence
  Description of Artificial Sequence: Synthetic oligonucleotide
aacacaagaagaacagacgga

SEQ ID NO: 35810 - DNA, 21 bp, Artificial Sequence
  Description of Artificial Sequence: Synthetic oligonucleotide
aacacaagaacactcagcaac

SEQ ID NO: 35811 - DNA, 21 bp, Artificial Sequence
  Description of Artificial Sequence: Synthetic oligonucleotide
aacacaagaacatacagcagc

SEQ ID NO: 35812 - DNA, 21 bp, Artificial Sequence
  Description of Artificial Sequence: Synthetic oligonucleotide
aacacaagcgacaacgcaaga

SEQ ID NO: 35813 - DNA, 21 bp, Artificial Sequence
  Description of Artificial Sequence: Synthetic oligonucleotide
aacacaagcttcagcagcagc

SEQ ID NO: 35814 - DNA, 21 bp, Artificial Sequence
  Description of Artificial Sequence: Synthetic oligonucleotide
aacacaagcaaagacctccca

SEQ ID NO: 35815 - DNA, 21 bp, Artificial Sequence
  Description of Artificial Sequence: Synthetic oligonucleotide
aacacaagccaattcgcaagc

SEQ ID NO: 35816 - DNA, 21 bp, Artificial Sequence
  Description of Artificial Sequence: Synthetic oligonucleotide
aacacaagcagcagcgacaaa

SEQ ID NO: 35817 - DNA, 21 bp, Artificial Sequence
  Description of Artificial Sequence: Synthetic oligonucleotide
aacacaagcgtcatgatggtc

SEQ ID NO: 35818 - DNA, 21 bp, Artificial Sequence
  Description of Artificial Sequence: Synthetic oligonucleotide
aacacaagcgtcagagtcgtc

SEQ ID NO: 35819 - DNA, 21 bp, Artificial Sequence
  Description of Artificial Sequence: Synthetic oligonucleotide
aacacaagctggaacggaagc

SEQ ID NO: 35820 - DNA, 21 bp, Artificial Sequence
  Description of Artificial Sequence: Synthetic oligonucleotide
aacacaacaaacagccaactc

SEQ ID NO: 35821 - DNA, 21 bp, Artificial Sequence
  Description of Artificial Sequence: Synthetic oligonucleotide
aacacaacaccaatcacaaac

SEQ ID NO: 35822 - DNA, 21 bp, Artificial Sequence
  Description of Artificial Sequence: Synthetic oligonucleotide
aacacaacagtcctcccaaaa

SEQ ID NO: 35823 - DNA, 21 bp, Artificial Sequence
  Description of Artificial Sequence: Synthetic oligonucleotide
aacacagtcccaatcaaagca

SEQ ID NO: 35824 - DNA, 21 bp, Artificial Sequence
  Description of Artificial Sequence: Synthetic oligonucleotide
aacacatacagaagagacgga

SEQ ID NO: 35825 - DNA, 21 bp, Artificial Sequence
  Description of Artificial Sequence: Synthetic oligonucleotide
aacgtcgcagcaagagcacac

SEQ ID NO: 35826 - DNA, 21 bp, Artificial Sequence
  Description of Artificial Sequence: Synthetic oligonucleotide
aacgtcgcaatcaacttcagc

SEQ ID NO: 35827 - DNA, 21 bp, Artificial Sequence
  Description of Artificial Sequence: Synthetic oligonucleotide
aacgtcgcaagaaacttcgtc

SEQ ID NO: 35828 - DNA, 21 bp, Artificial Sequence
  Description of Artificial Sequence: Synthetic oligonucleotide
aacgtcgcagtcggataccaa

SEQ ID NO: 35829 - DNA, 21 bp, Artificial Sequence
  Description of Artificial Sequence: Synthetic oligonucleotide
aacgtcgcagtcgtcctcagc

SEQ ID NO: 35830 - DNA, 21 bp, Artificial Sequence
  Description of Artificial Sequence: Synthetic oligonucleotide
aacgtcgcatgggtcacagaa

SEQ ID NO: 35831 - DNA, 21 bp, Artificial Sequence
  Description of Artificial Sequence: Synthetic oligonucleotide
aacgtcgacgcaaacgtcctc

SEQ ID NO: 35832 - DNA, 21 bp, Artificial Sequence
  Description of Artificial Sequence: Synthetic oligonucleotide
aacgtcgacacaagcacagac

SEQ ID NO: 35833 - DNA, 21 bp, Artificial Sequence
  Description of Artificial Sequence: Synthetic oligonucleotide
aacgtcgaacaaccaagctgc

SEQ ID NO: 35834 - DNA, 21 bp, Artificial Sequence
  Description of Artificial Sequence: Synthetic oligonucleotide
aacgtcgaaagcaacccactc

SEQ ID NO: 35835 - DNA, 21 bp, Artificial Sequence
  Description of Artificial Sequence: Synthetic oligonucleotide
aacgtcttcgcagtctgcgaa

SEQ ID NO: 35836 - DNA, 21 bp, Artificial Sequence
  Description of Artificial Sequence: Synthetic oligonucleotide
aacgtcttcagcgcaacacca

SEQ ID NO: 35837 - DNA, 21 bp, Artificial Sequence
  Description of Artificial Sequence: Synthetic oligonucleotide
aacgtcttcgtcgcagtcaac

SEQ ID NO: 35838 - DNA, 21 bp, Artificial Sequence
  Description of Artificial Sequence: Synthetic oligonucleotide
aacgtcggagcaacagaagtc

SEQ ID NO: 35839 - DNA, 21 bp, Artificial Sequence
  Description of Artificial Sequence: Synthetic oligonucleotide
aacgtccacgcactcgaaagc

SEQ ID NO: 35840 - DNA, 21 bp, Artificial Sequence
  Description of Artificial Sequence: Synthetic oligonucleotide
aacgtccacacaccaagccaa

SEQ ID NO: 35841 - DNA, 21 bp, Artificial Sequence
  Description of Artificial Sequence: Synthetic oligonucleotide
aacgtcatcaacacaccacaa

SEQ ID NO: 35842 - DNA, 21 bp, Artificial Sequence
  Description of Artificial Sequence: Synthetic oligonucleotide
aacgtcaaactcaacagcttc

SEQ ID NO: 35843 - DNA, 21 bp, Artificial Sequence
  Description of Artificial Sequence: Synthetic oligonucleotide
aacgtcctcggagcacaacaa

SEQ ID NO: 35844 - DNA, 21 bp, Artificial Sequence
  Description of Artificial Sequence: Synthetic oligonucleotide
aacgtcctcatcaaatacagc

SEQ ID NO: 35845 - DNA, 21 bp, Artificial Sequence
  Description of Artificial Sequence: Synthetic oligonucleotide
aacgtcctcagaccacaagtc

SEQ ID NO: 35846 - DNA, 21 bp, Artificial Sequence
  Description of Artificial Sequence: Synthetic oligonucleotide
aacgtcatgatggcaagaatg

SEQ ID NO: 35847 - DNA, 21 bp, Artificial Sequence
  Description of Artificial Sequence: Synthetic oligonucleotide
aacgtcatggtcagactccca

SEQ ID NO: 35848 - DNA, 21 bp, Artificial Sequence
  Description of Artificial Sequence: Synthetic oligonucleotide
aacgtcatggtcagaatggga

SEQ ID NO: 35849 - DNA, 21 bp, Artificial Sequence
  Description of Artificial Sequence: Synthetic oligonucleotide
aacgtcaaccaaccagacaca

SEQ ID NO: 35850 - DNA, 21 bp, Artificial Sequence
  Description of Artificial Sequence: Synthetic oligonucleotide
aacgtcaaccaatacagcgga

SEQ ID NO: 35851 - DNA, 21 bp, Artificial Sequence
  Description of Artificial Sequence: Synthetic oligonucleotide
aacgtcccagcagcaagctac

SEQ ID NO: 35852 - DNA, 21 bp, Artificial Sequence
  Description of Artificial Sequence: Synthetic oligonucleotide
aacgtcccagcagcaacattc

SEQ ID NO: 35853 - DNA, 21 bp, Artificial Sequence
  Description of Artificial Sequence: Synthetic oligonucleotide
aacgtcccagaaagcagcgac

SEQ ID NO: 35854 - DNA, 21 bp, Artificial Sequence
  Description of Artificial Sequence: Synthetic oligonucleotide
aacgtcccaagcacaaaagaa

SEQ ID NO: 35855 - DNA, 21 bp, Artificial Sequence
  Description of Artificial Sequence: Synthetic oligonucleotide
aacgtccaagcaacaggatac

SEQ ID NO: 35856 - DNA, 21 bp, Artificial Sequence
  Description of Artificial Sequence: Synthetic oligonucleotide
aacgtccaattcagcagcgga

SEQ ID NO: 35857 - DNA, 21 bp, Artificial Sequence
  Description of Artificial Sequence: Synthetic oligonucleotide
aacgtcagactccaagcaatc

SEQ ID NO: 35858 - DNA, 21 bp, Artificial Sequence
  Description of Artificial Sequence: Synthetic oligonucleotide
aacgtcagactcagcatcgac

SEQ ID NO: 35859 - DNA, 21 bp, Artificial Sequence
  Description of Artificial Sequence: Synthetic oligonucleotide
aacgtcagaccacaaagcaca

SEQ ID NO: 35860 - DNA, 21 bp, Artificial Sequence
  Description of Artificial Sequence: Synthetic oligonucleotide
aacgtcagaccagtcctcagc

SEQ ID NO: 35861 - DNA, 21 bp, Artificial Sequence
  Description of Artificial Sequence: Synthetic oligonucleotide
aacgtcagacaacaaagcgca

SEQ ID NO: 35862 - DNA, 21 bp, Artificial Sequence
  Description of Artificial Sequence: Synthetic oligonucleotide
aacgtcagaagcgtcacaaac

SEQ ID NO: 35863 - DNA, 21 bp, Artificial Sequence
  Description of Artificial Sequence: Synthetic oligonucleotide
aacgtcagaagctacgcagca

SEQ ID NO: 35864 - DNA, 21 bp, Artificial Sequence
  Description of Artificial Sequence: Synthetic oligonucleotide
aacgtcagaacagtcgcagaa

SEQ ID NO: 35865 - DNA, 21 bp, Artificial Sequence
  Description of Artificial Sequence: Synthetic oligonucleotide
aacgtcagcttcccaagcctc

SEQ ID NO: 35866 - DNA, 21 bp, Artificial Sequence
  Description of Artificial Sequence: Synthetic oligonucleotide
aacgtcagcaacgtcccaagc

SEQ ID NO: 35867 - DNA, 21 bp, Artificial Sequence
  Description of Artificial Sequence: Synthetic oligonucleotide
aacgtcagcccactcttcctc

SEQ ID NO: 35868 - DNA, 21 bp, Artificial Sequence
  Description of Artificial Sequence: Synthetic oligonucleotide
aacgtcagcagaacaacactc

SEQ ID NO: 35869 - DNA, 21 bp, Artificial Sequence
  Description of Artificial Sequence: Synthetic oligonucleotide
aacgtcagcagaacagtcagc

SEQ ID NO: 35870 - DNA, 21 bp, Artificial Sequence
  Description of Artificial Sequence: Synthetic oligonucleotide
aacgtcagcagcgcaccaaaa

SEQ ID NO: 35871 - DNA, 21 bp, Artificial Sequence
  Description of Artificial Sequence: Synthetic oligonucleotide
aacgtcagcacagcactcagc

SEQ ID NO: 35872 - DNA, 21 bp, Artificial Sequence
  Description of Artificial Sequence: Synthetic oligonucleotide
aacgtcacagcaatcggactc

SEQ ID NO: 35873 - DNA, 21 bp, Artificial Sequence
  Description of Artificial Sequence: Synthetic oligonucleotide
aacgtcacaccaccagacaac

SEQ ID NO: 35874 - DNA, 21 bp, Artificial Sequence
  Description of Artificial Sequence: Synthetic oligonucleotide
aacgtcacaacaagcgaagca

SEQ ID NO: 35875 - DNA, 21 bp, Artificial Sequence
  Description of Artificial Sequence: Synthetic oligonucleotide
aacgtcgtcccaccactcaca

SEQ ID NO: 35876 - DNA, 21 bp, Artificial Sequence
  Description of Artificial Sequence: Synthetic oligonucleotide
aacgtcgtcagcagaagccca

SEQ ID NO: 35877 - DNA, 21 bp, Artificial Sequence
  Description of Artificial Sequence: Synthetic oligonucleotide
aacgtcgtcacaaaaccaatg

SEQ ID NO: 35878 - DNA, 21 bp, Artificial Sequence
  Description of Artificial Sequence: Synthetic oligonucleotide
aacgtcgtcgtcccagtcgga

SEQ ID NO: 35879 - DNA, 21 bp, Artificial Sequence
  Description of Artificial Sequence: Synthetic oligonucleotide
aactgggcaagcgaccacgtc

SEQ ID NO: 35880 - DNA, 21 bp, Artificial Sequence
  Description of Artificial Sequence: Synthetic oligonucleotide
aactggggacaagaaaaactc

SEQ ID NO: 35881 - DNA, 21 bp, Artificial Sequence
  Description of Artificial Sequence: Synthetic oligonucleotide
aactggccagacccagaaagc

SEQ ID NO: 35882 - DNA, 21 bp, Artificial Sequence
  Description of Artificial Sequence: Synthetic oligonucleotide
aactggacagcagcaacacca

SEQ ID NO: 35883 - DNA, 21 bp, Artificial Sequence
  Description of Artificial Sequence: Synthetic oligonucleotide
aactacgcaggaagcgacgga

SEQ ID NO: 35884 - DNA, 21 bp, Artificial Sequence
  Description of Artificial Sequence: Synthetic oligonucleotide
aactacgcaaaagtccacaca

SEQ ID NO: 35885 - DNA, 21 bp, Artificial Sequence
  Description of Artificial Sequence: Synthetic oligonucleotide
aactacgcaagccaaatcgtc

SEQ ID NO: 35886 - DNA, 21 bp, Artificial Sequence
  Description of Artificial Sequence: Synthetic oligonucleotide
aactacgacagagaacaaatg

SEQ ID NO: 35887 - DNA, 21 bp, Artificial Sequence
  Description of Artificial Sequence: Synthetic oligonucleotide
aactacgaaccaacaagcgac

SEQ ID NO: 35888 - DNA, 21 bp, Artificial Sequence
  Description of Artificial Sequence: Synthetic oligonucleotide
aactacggaaacagcatccca

SEQ ID NO: 35889 - DNA, 21 bp, Artificial Sequence
  Description of Artificial Sequence: Synthetic oligonucleotide
aactaccacacaagcctcgtc

SEQ ID NO: 35890 - DNA, 21 bp, Artificial Sequence
  Description of Artificial Sequence: Synthetic oligonucleotide
aactacaacacaccaaaccca

SEQ ID NO: 35891 - DNA, 21 bp, Artificial Sequence
  Description of Artificial Sequence: Synthetic oligonucleotide
aactacccagacacaccaaac

SEQ ID NO: 35892 - DNA, 21 bp, Artificial Sequence
  Description of Artificial Sequence: Synthetic oligonucleotide
aactacccagacgtcagaagc

SEQ ID NO: 35893 - DNA, 21 bp, Artificial Sequence
  Description of Artificial Sequence: Synthetic oligonucleotide
aactacccaccaagcagactc

SEQ ID NO: 35894 - DNA, 21 bp, Artificial Sequence
  Description of Artificial Sequence: Synthetic oligonucleotide
aactacagacaaacactcagc

SEQ ID NO: 35895 - DNA, 21 bp, Artificial Sequence
  Description of Artificial Sequence: Synthetic oligonucleotide
ccagcagcagacagaaacctc

SEQ ID NO: 35896 - DNA, 21 bp, Artificial Sequence
  Description of Artificial Sequence: Synthetic oligonucleotide
ccagcagcagaattcgcaagc

SEQ ID NO: 35897 - DNA, 21 bp, Artificial Sequence
  Description of Artificial Sequence: Synthetic oligonucleotide
ccagcagcaagagaaagactc

SEQ ID NO: 35898 - DNA, 21 bp, Artificial Sequence
  Description of Artificial Sequence: Synthetic oligonucleotide
ccagcagacctcggaagcatg

SEQ ID NO: 35899 - DNA, 21 bp, Artificial Sequence
  Description of Artificial Sequence: Synthetic oligonucleotide
ccagcagacaacggaccatgg

SEQ ID NO: 35900 - DNA, 21 bp, Artificial Sequence
  Description of Artificial Sequence: Synthetic oligonucleotide
ccagcagacccaccaagcgtc

SEQ ID NO: 35901 - DNA, 21 bp, Artificial Sequence
  Description of Artificial Sequence: Synthetic oligonucleotide
ccagcagacagaagcccaaca

SEQ ID NO: 35902 - DNA, 21 bp, Artificial Sequence
  Description of Artificial Sequence: Synthetic oligonucleotide
ccagcagactaccaaaaagac

SEQ ID NO: 35903 - DNA, 21 bp, Artificial Sequence
  Description of Artificial Sequence: Synthetic oligonucleotide
ccagcagaaaaagtcagaaca

SEQ ID NO: 35904 - DNA, 21 bp, Artificial Sequence
  Description of Artificial Sequence: Synthetic oligonucleotide
ccagcattcagcggaagagac

SEQ ID NO: 35905 - DNA, 21 bp, Artificial Sequence
  Description of Artificial Sequence: Synthetic oligonucleotide
ccagcattcagcatgagcatc

SEQ ID NO: 35906 - DNA, 21 bp, Artificial Sequence
  Description of Artificial Sequence: Synthetic oligonucleotide
ccagcaggactcccagacaga

SEQ ID NO: 35907 - DNA, 21 bp, Artificial Sequence
  Description of Artificial Sequence: Synthetic oligonucleotide
ccagcaggaagccaaccacca

SEQ ID NO: 35908 - DNA, 21 bp, Artificial Sequence
  Description of Artificial Sequence: Synthetic oligonucleotide
ccagcaggaagcacaatgcca

SEQ ID NO: 35909 - DNA, 21 bp, Artificial Sequence
  Description of Artificial Sequence: Synthetic oligonucleotide
ccagcacacgcactcacaatg

SEQ ID NO: 35910 - DNA, 21 bp, Artificial Sequence
  Description of Artificial Sequence: Synthetic oligonucleotide
ccagcacacttcacaacagga

SEQ ID NO: 35911 - DNA, 21 bp, Artificial Sequence
  Description of Artificial Sequence: Synthetic oligonucleotide
ccagcaatcggagtccacaga

SEQ ID NO: 35912 - DNA, 21 bp, Artificial Sequence
  Description of Artificial Sequence: Synthetic oligonucleotide
ccagcaatcaaaagccaactc

SEQ ID NO: 35913 - DNA, 21 bp, Artificial Sequence
  Description of Artificial Sequence: Synthetic oligonucleotide
ccagcaatcctcagaacaagc

SEQ ID NO: 35914 - DNA, 21 bp, Artificial Sequence
  Description of Artificial Sequence: Synthetic oligonucleotide
ccagcaatcagcggaacaatc

SEQ ID NO: 35915 - DNA, 21 bp, Artificial Sequence
  Description of Artificial Sequence: Synthetic oligonucleotide
ccagcaaaaccaatcgacttc

SEQ ID NO: 35916 - DNA, 21 bp, Artificial Sequence
  Description of Artificial Sequence: Synthetic oligonucleotide
ccagcactcgcaccaatctac

SEQ ID NO: 35917 - DNA, 21 bp, Artificial Sequence
  Description of Artificial Sequence: Synthetic oligonucleotide
ccagcactcatggcaccagca

SEQ ID NO: 35918 - DNA, 21 bp, Artificial Sequence
  Description of Artificial Sequence: Synthetic oligonucleotide
ccagcaatgggacaaagcgac

SEQ ID NO: 35919 - DNA, 21 bp, Artificial Sequence
  Description of Artificial Sequence: Synthetic oligonucleotide
ccagcaatgagcgacagaagc

SEQ ID NO: 35920 - DNA, 21 bp, Artificial Sequence
  Description of Artificial Sequence: Synthetic oligonucleotide
ccagcaatgagcaacacaatc

SEQ ID NO: 35921 - DNA, 21 bp, Artificial Sequence
  Description of Artificial Sequence: Synthetic oligonucleotide
ccagcaaacgacgcagacaga

SEQ ID NO: 35922 - DNA, 21 bp, Artificial Sequence
  Description of Artificial Sequence: Synthetic oligonucleotide
ccagcaaacctcacaagccca

SEQ ID NO: 35923 - DNA, 21 bp, Artificial Sequence
  Description of Artificial Sequence: Synthetic oligonucleotide
ccagcaaacccaccagacagc

SEQ ID NO: 35924 - DNA, 21 bp, Artificial Sequence
  Description of Artificial Sequence: Synthetic oligonucleotide
ccagcaaacccaccaaaaagc

SEQ ID NO: 35925 - DNA, 21 bp, Artificial Sequence
  Description of Artificial Sequence: Synthetic oligonucleotide
ccagcaaacagagtcggaaca

SEQ ID NO: 35926 - DNA, 21 bp, Artificial Sequence
  Description of Artificial Sequence: Synthetic oligonucleotide
ccagcaaactacctcagcgtc

SEQ ID NO: 35927 - DNA, 21 bp, Artificial Sequence
  Description of Artificial Sequence: Synthetic oligonucleotide
ccagcaccaatgaacttccaa

SEQ ID NO: 35928 - DNA, 21 bp, Artificial Sequence
  Description of Artificial Sequence: Synthetic oligonucleotide
ccagcaccaagccaccaaagc

SEQ ID NO: 35929 - DNA, 21 bp, Artificial Sequence
  Description of Artificial Sequence: Synthetic oligonucleotide
ccagcaccaacaagcatcgca

SEQ ID NO: 35930 - DNA, 21 bp, Artificial Sequence
  Description of Artificial Sequence: Synthetic oligonucleotide
ccagcacaaagaacaatggca

SEQ ID NO: 35931 - DNA, 21 bp, Artificial Sequence
  Description of Artificial Sequence: Synthetic oligonucleotide
ccagcacaaagcacaggacca

SEQ ID NO: 35932 - DNA, 21 bp, Artificial Sequence
  Description of Artificial Sequence: Synthetic oligonucleotide
ccagcaagagcagacccagca

SEQ ID NO: 35933 - DNA, 21 bp, Artificial Sequence
  Description of Artificial Sequence: Synthetic oligonucleotide
ccagcaagagcattcgacgca

SEQ ID NO: 35934 - DNA, 21 bp, Artificial Sequence
  Description of Artificial Sequence: Synthetic oligonucleotide
ccagcaagaatcacaggaatg

SEQ ID NO: 35935 - DNA, 21 bp, Artificial Sequence
  Description of Artificial Sequence: Synthetic oligonucleotide
ccagcaagactcgcaacaaac

SEQ ID NO: 35936 - DNA, 21 bp, Artificial Sequence
  Description of Artificial Sequence: Synthetic oligonucleotide
ccagcaagaagaccagacgac

SEQ ID NO: 35937 - DNA, 21 bp, Artificial Sequence
  Description of Artificial Sequence: Synthetic oligonucleotide
ccagcaagaacactcatccac

SEQ ID NO: 35938 - DNA, 21 bp, Artificial Sequence
  Description of Artificial Sequence: Synthetic oligonucleotide
ccagcaagaacaaacccaaca

SEQ ID NO: 35939 - DNA, 21 bp, Artificial Sequence
  Description of Artificial Sequence: Synthetic oligonucleotide
ccagcaagaacacaagtcgac

SEQ ID NO: 35940 - DNA, 21 bp, Artificial Sequence
  Description of Artificial Sequence: Synthetic oligonucleotide
ccagcaagcgaaagaagcctc

SEQ ID NO: 35941 - DNA, 21 bp, Artificial Sequence
  Description of Artificial Sequence: Synthetic oligonucleotide
ccagcaagcttcggaatcaac

SEQ ID NO: 35942 - DNA, 21 bp, Artificial Sequence
  Description of Artificial Sequence: Synthetic oligonucleotide
ccagcaagccacatgaaccca

SEQ ID NO: 35943 - DNA, 21 bp, Artificial Sequence
  Description of Artificial Sequence: Synthetic oligonucleotide
ccagcaagcccactccacagc

SEQ ID NO: 35944 - DNA, 21 bp, Artificial Sequence
  Description of Artificial Sequence: Synthetic oligonucleotide
ccagcaagcccagtcacaagc

SEQ ID NO: 35945 - DNA, 21 bp, Artificial Sequence
  Description of Artificial Sequence: Synthetic oligonucleotide
ccagcaagcgtcatggcagga

SEQ ID NO: 35946 - DNA, 21 bp, Artificial Sequence
  Description of Artificial Sequence: Synthetic oligonucleotide
ccagcaacagcactcagcaga

SEQ ID NO: 35947 - DNA, 21 bp, Artificial Sequence
  Description of Artificial Sequence: Synthetic oligonucleotide
ccagcaacaggactcccatac

SEQ ID NO: 35948 - DNA, 21 bp, Artificial Sequence
  Description of Artificial Sequence: Synthetic oligonucleotide
ccagcaacaatgatcagacac

SEQ ID NO: 35949 - DNA, 21 bp, Artificial Sequence
  Description of Artificial Sequence: Synthetic oligonucleotide
ccagcaacaaacgtcagagga

SEQ ID NO: 35950 - DNA, 21 bp, Artificial Sequence
  Description of Artificial Sequence: Synthetic oligonucleotide
ccagcaacaccaagcgtcgtc

SEQ ID NO: 35951 - DNA, 21 bp, Artificial Sequence
  Description of Artificial Sequence: Synthetic oligonucleotide
ccagcaacaagcagcgtcagc

SEQ ID NO: 35952 - DNA, 21 bp, Artificial Sequence
  Description of Artificial Sequence: Synthetic oligonucleotide
ccagcagtcgaagcagacgga

SEQ ID NO: 35953 - DNA, 21 bp, Artificial Sequence
  Description of Artificial Sequence: Synthetic oligonucleotide
ccagcagtcaaaccaagcttc

SEQ ID NO: 35954 - DNA, 21 bp, Artificial Sequence
  Description of Artificial Sequence: Synthetic oligonucleotide
ccagcatacccacacgcacca

SEQ ID NO: 35955 - DNA, 21 bp, Artificial Sequence
  Description of Artificial Sequence: Synthetic oligonucleotide
ccagacgcagaaatcagaaga

SEQ ID NO: 35956 - DNA, 21 bp, Artificial Sequence
  Description of Artificial Sequence: Synthetic oligonucleotide
ccagacgacttcagacaccac

SEQ ID NO: 35957 - DNA, 21 bp, Artificial Sequence
  Description of Artificial Sequence: Synthetic oligonucleotide
ccagacgaactcaaagtcaga

SEQ ID NO: 35958 - DNA, 21 bp, Artificial Sequence
  Description of Artificial Sequence: Synthetic oligonucleotide
ccagacggagacacagcactc

SEQ ID NO: 35959 - DNA, 21 bp, Artificial Sequence
  Description of Artificial Sequence: Synthetic oligonucleotide
ccagacggaagcagcagacac

SEQ ID NO: 35960 - DNA, 21 bp, Artificial Sequence
  Description of Artificial Sequence: Synthetic oligonucleotide
ccagaccacgcaagcatcagc

SEQ ID NO: 35961 - DNA, 21 bp, Artificial Sequence
  Description of Artificial Sequence: Synthetic oligonucleotide
ccagaccacggaggaatcgca

SEQ ID NO: 35962 - DNA, 21 bp, Artificial Sequence
  Description of Artificial Sequence: Synthetic oligonucleotide
ccagaccacagaagcccaaac

SEQ ID NO: 35963 - DNA, 21 bp, Artificial Sequence
  Description of Artificial Sequence: Synthetic oligonucleotide
ccagaccacagcaacgaccaa

SEQ ID NO: 35964 - DNA, 21 bp, Artificial Sequence
  Description of Artificial Sequence: Synthetic oligonucleotide
ccagacatcgcattcgcagaa

SEQ ID NO: 35965 - DNA, 21 bp, Artificial Sequence
  Description of Artificial Sequence: Synthetic oligonucleotide
ccagacctcgaagtcgtcaaa

SEQ ID NO: 35966 - DNA, 21 bp, Artificial Sequence
  Description of Artificial Sequence: Synthetic oligonucleotide
ccagacctcatcagcgacgca

SEQ ID NO: 35967 - DNA, 21 bp, Artificial Sequence
  Description of Artificial Sequence: Synthetic oligonucleotide
ccagacctcccaggaatcaga

SEQ ID NO: 35968 - DNA, 21 bp, Artificial Sequence
  Description of Artificial Sequence: Synthetic oligonucleotide
ccagacaacctccaagtcagc

SEQ ID NO: 35969 - DNA, 21 bp, Artificial Sequence
  Description of Artificial Sequence: Synthetic oligonucleotide
ccagacaacgtcagaacattc

SEQ ID NO: 35970 - DNA, 21 bp, Artificial Sequence
  Description of Artificial Sequence: Synthetic oligonucleotide
ccagacaacgtctacaacgac

SEQ ID NO: 35971 - DNA, 21 bp, Artificial Sequence
  Description of Artificial Sequence: Synthetic oligonucleotide
ccagacccagcatacctccac

SEQ ID NO: 35972 - DNA, 21 bp, Artificial Sequence
  Description of Artificial Sequence: Synthetic oligonucleotide
ccagacccaatcgacagacca

SEQ ID NO: 35973 - DNA, 21 bp, Artificial Sequence
  Description of Artificial Sequence: Synthetic oligonucleotide
ccagacccaccaacaagccca

SEQ ID NO: 35974 - DNA, 21 bp, Artificial Sequence
  Description of Artificial Sequence: Synthetic oligonucleotide
ccagaccaagcaagcggaaga

SEQ ID NO: 35975 - DNA, 21 bp, Artificial Sequence
  Description of Artificial Sequence: Synthetic oligonucleotide
ccagaccaaatggtcagaatc

SEQ ID NO: 35976 - DNA, 21 bp, Artificial Sequence
  Description of Artificial Sequence: Synthetic oligonucleotide
ccagaccaaagaggaaaccac

SEQ ID NO: 35977 - DNA, 21 bp, Artificial Sequence
  Description of Artificial Sequence: Synthetic oligonucleotide
ccagaccaaagcctcacagga

SEQ ID NO: 35978 - DNA, 21 bp, Artificial Sequence
  Description of Artificial Sequence: Synthetic oligonucleotide
ccagacagactcctcgacaga

SEQ ID NO: 35979 - DNA, 21 bp, Artificial Sequence
  Description of Artificial Sequence: Synthetic oligonucleotide
ccagacagactcagcgaattc

SEQ ID NO: 35980 - DNA, 21 bp, Artificial Sequence
  Description of Artificial Sequence: Synthetic oligonucleotide
ccagacagaatgcaaaacaga

SEQ ID NO: 35981 - DNA, 21 bp, Artificial Sequence
  Description of Artificial Sequence: Synthetic oligonucleotide
ccagacagacaacaacaactc

SEQ ID NO: 35982 - DNA, 21 bp, Artificial Sequence
  Description of Artificial Sequence: Synthetic oligonucleotide
ccagacagagtcccaacagtc

SEQ ID NO: 35983 - DNA, 21 bp, Artificial Sequence
  Description of Artificial Sequence: Synthetic oligonucleotide
ccagacagcgcaccactccca

SEQ ID NO: 35984 - DNA, 21 bp, Artificial Sequence
  Description of Artificial Sequence: Synthetic oligonucleotide
ccagacagcgacccaccacac

SEQ ID NO: 35985 - DNA, 21 bp, Artificial Sequence
  Description of Artificial Sequence: Synthetic oligonucleotide
ccagacagcatgtacagaagc

SEQ ID NO: 35986 - DNA, 21 bp, Artificial Sequence
  Description of Artificial Sequence: Synthetic oligonucleotide
ccagacagcacactccaattc

SEQ ID NO: 35987 - DNA, 21 bp, Artificial Sequence
  Description of Artificial Sequence: Synthetic oligonucleotide
ccagacacagacccaccactc

SEQ ID NO: 35988 - DNA, 21 bp, Artificial Sequence
  Description of Artificial Sequence: Synthetic oligonucleotide
ccagacacaaaatggtgccac

SEQ ID NO: 35989 - DNA, 21 bp, Artificial Sequence
  Description of Artificial Sequence: Synthetic oligonucleotide
ccagacacaagccacgacctc

SEQ ID NO: 35990 - DNA, 21 bp, Artificial Sequence
  Description of Artificial Sequence: Synthetic oligonucleotide
ccagacgtcaaagcaggaaga

SEQ ID NO: 35991 - DNA, 21 bp, Artificial Sequence
  Description of Artificial Sequence: Synthetic oligonucleotide
ccagactacgcaaaactcagc

SEQ ID NO: 35992 - DNA, 21 bp, Artificial Sequence
  Description of Artificial Sequence: Synthetic oligonucleotide
ccagactacgaaaaaaaacaa

SEQ ID NO: 35993 - DNA, 21 bp, Artificial Sequence
  Description of Artificial Sequence: Synthetic oligonucleotide
ccagactacagcgcagtcctc

SEQ ID NO: 35994 - DNA, 21 bp, Artificial Sequence
  Description of Artificial Sequence: Synthetic oligonucleotide
ccagaagcagaagacgacatc

SEQ ID NO: 35995 - DNA, 21 bp, Artificial Sequence
  Description of Artificial Sequence: Synthetic oligonucleotide
ccagaagcactcagaacagga

SEQ ID NO: 35996 - DNA, 21 bp, Artificial Sequence
  Description of Artificial Sequence: Synthetic oligonucleotide
ccagaagaaccaagactcagc

SEQ ID NO: 35997 - DNA, 21 bp, Artificial Sequence
  Description of Artificial Sequence: Synthetic oligonucleotide
ccagaagaagtctgcagaatc

SEQ ID NO: 35998 - DNA, 21 bp, Artificial Sequence
  Description of Artificial Sequence: Synthetic oligonucleotide
ccagaattcgcaatcgacgca

SEQ ID NO: 35999 - DNA, 21 bp, Artificial Sequence
  Description of Artificial Sequence: Synthetic oligonucleotide
ccagaattcaaaacaagaaac

SEQ ID NO: 36000 - DNA, 21 bp, Artificial Sequence
  Description of Artificial Sequence: Synthetic oligonucleotide
ccagaaggaagactccacgca

SEQ ID NO: 36001 - DNA, 21 bp, Artificial Sequence
  Description of Artificial Sequence: Synthetic oligonucleotide
ccagaaaaagacacacacaga

SEQ ID NO: 36002 - DNA, 21 bp, Artificial Sequence
  Description of Artificial Sequence: Synthetic oligonucleotide
ccagaaaaatacagccaaaac

SEQ ID NO: 36003 - DNA, 21 bp, Artificial Sequence
  Description of Artificial Sequence: Synthetic oligonucleotide
ccagaaatgggaagactcgga

SEQ ID NO: 36004 - DNA, 21 bp, Artificial Sequence
  Description of Artificial Sequence: Synthetic oligonucleotide
ccagaaatgaaaccaggacaa

SEQ ID NO: 36005 - DNA, 21 bp, Artificial Sequence
  Description of Artificial Sequence: Synthetic oligonucleotide
ccagaaaacagcaaagtcgac

SEQ ID NO: 36006 - DNA, 21 bp, Artificial Sequence
  Description of Artificial Sequence: Synthetic oligonucleotide
ccagaaaacagccaaagagga

SEQ ID NO: 36007 - DNA, 21 bp, Artificial Sequence
  Description of Artificial Sequence: Synthetic oligonucleotide
ccagaaaacacaacatacgca

SEQ ID NO: 36008 - DNA, 21 bp, Artificial Sequence
  Description of Artificial Sequence: Synthetic oligonucleotide
ccagaaccaagcaacacaaga

SEQ ID NO: 36009 - DNA, 21 bp, Artificial Sequence
  Description of Artificial Sequence: Synthetic oligonucleotide
ccagaaccaacactcaacctc

SEQ ID NO: 36010 - DNA, 21 bp, Artificial Sequence
  Description of Artificial Sequence: Synthetic oligonucleotide
ccagaaagaggactccacgtc

SEQ ID NO: 36011 - DNA, 21 bp, Artificial Sequence
  Description of Artificial Sequence: Synthetic oligonucleotide
ccagaaagaaaagcacacaca

SEQ ID NO: 36012 - DNA, 21 bp, Artificial Sequence
  Description of Artificial Sequence: Synthetic oligonucleotide
ccagaaagaccagcactcagc

SEQ ID NO: 36013 - DNA, 21 bp, Artificial Sequence
  Description of Artificial Sequence: Synthetic oligonucleotide
ccagaaagaagccaagcagga

SEQ ID NO: 36014 - DNA, 21 bp, Artificial Sequence
  Description of Artificial Sequence: Synthetic oligonucleotide
ccagaaagaagcacatgggtc

SEQ ID NO: 36015 - DNA, 21 bp, Artificial Sequence
  Description of Artificial Sequence: Synthetic oligonucleotide
ccagaaagcaaagacgcacac

SEQ ID NO: 36016 - DNA, 21 bp, Artificial Sequence
  Description of Artificial Sequence: Synthetic oligonucleotide
ccagaaagcccaagaacactc

SEQ ID NO: 36017 - DNA, 21 bp, Artificial Sequence
  Description of Artificial Sequence: Synthetic oligonucleotide
ccagaaagcgtcctcagaaga

SEQ ID NO: 36018 - DNA, 21 bp, Artificial Sequence
  Description of Artificial Sequence: Synthetic oligonucleotide
ccagaaagctggccaagccca

SEQ ID NO: 36019 - DNA, 21 bp, Artificial Sequence
  Description of Artificial Sequence: Synthetic oligonucleotide
ccagaaacaagcccaagacca

SEQ ID NO: 36020 - DNA, 21 bp, Artificial Sequence
  Description of Artificial Sequence: Synthetic oligonucleotide
ccattcgcagaagcaggaatc

SEQ ID NO: 36021 - DNA, 21 bp, Artificial Sequence
  Description of Artificial Sequence: Synthetic oligonucleotide
ccattcgcaggacacgcactc

SEQ ID NO: 36022 - DNA, 21 bp, Artificial Sequence
  Description of Artificial Sequence: Synthetic oligonucleotide
ccattcgcacaaacactcaca

SEQ ID NO: 36023 - DNA, 21 bp, Artificial Sequence
  Description of Artificial Sequence: Synthetic oligonucleotide
ccattcgcaagcagcacaagc

SEQ ID NO: 36024 - DNA, 21 bp, Artificial Sequence
  Description of Artificial Sequence: Synthetic oligonucleotide
ccattcgaccacctcacagac

SEQ ID NO: 36025 - DNA, 21 bp, Artificial Sequence
  Description of Artificial Sequence: Synthetic oligonucleotide
ccattcggagtcagcgtcgac

SEQ ID NO: 36026 - DNA, 21 bp, Artificial Sequence
  Description of Artificial Sequence: Synthetic oligonucleotide
ccattcccacacgacagacca

SEQ ID NO: 36027 - DNA, 21 bp, Artificial Sequence
  Description of Artificial Sequence: Synthetic oligonucleotide
ccattccaaacaggaagcgga

SEQ ID NO: 36028 - DNA, 21 bp, Artificial Sequence
  Description of Artificial Sequence: Synthetic oligonucleotide
ccattcagaatccaaacagac

SEQ ID NO: 36029 - DNA, 21 bp, Artificial Sequence
  Description of Artificial Sequence: Synthetic oligonucleotide
ccattcagaccagtcgtcgac

SEQ ID NO: 36030 - DNA, 21 bp, Artificial Sequence
  Description of Artificial Sequence: Synthetic oligonucleotide
ccattcagcgacctcagaatg

SEQ ID NO: 36031 - DNA, 21 bp, Artificial Sequence
  Description of Artificial Sequence: Synthetic oligonucleotide
ccattcagcggactcacagga

SEQ ID NO: 36032 - DNA, 21 bp, Artificial Sequence
  Description of Artificial Sequence: Synthetic oligonucleotide
ccattcagcaacatccaaatg

SEQ ID NO: 36033 - DNA, 21 bp, Artificial Sequence
  Description of Artificial Sequence: Synthetic oligonucleotide
ccattcagcagcgcagtcatc

SEQ ID NO: 36034 - DNA, 21 bp, Artificial Sequence
  Description of Artificial Sequence: Synthetic oligonucleotide
ccattcagcagcccaagccca

SEQ ID NO: 36035 - DNA, 21 bp, Artificial Sequence
  Description of Artificial Sequence: Synthetic oligonucleotide
ccattcagcacaccagacatg

SEQ ID NO: 36036 - DNA, 21 bp, Artificial Sequence
  Description of Artificial Sequence: Synthetic oligonucleotide
ccattcacagcaggattcagc

SEQ ID NO: 36037 - DNA, 21 bp, Artificial Sequence
  Description of Artificial Sequence: Synthetic oligonucleotide
ccattcacagcaacagacaga

SEQ ID NO: 36038 - DNA, 21 bp, Artificial Sequence
  Description of Artificial Sequence: Synthetic oligonucleotide
ccattcacagacgaactcatg

SEQ ID NO: 36039 - DNA, 21 bp, Artificial Sequence
  Description of Artificial Sequence: Synthetic oligonucleotide
ccattcacaggagcaccacaa

SEQ ID NO: 36040 - DNA, 21 bp, Artificial Sequence
  Description of Artificial Sequence: Synthetic oligonucleotide
ccaggagcaagaagagaactc

SEQ ID NO: 36041 - DNA, 21 bp, Artificial Sequence
  Description of Artificial Sequence: Synthetic oligonucleotide
ccaggagcagtcccaccaagc

SEQ ID NO: 36042 - DNA, 21 bp, Artificial Sequence
  Description of Artificial Sequence: Synthetic oligonucleotide
ccaggatgcagcagcgtcgtc

SEQ ID NO: 36043 - DNA, 21 bp, Artificial Sequence
  Description of Artificial Sequence: Synthetic oligonucleotide
ccaggagacgcaaaaccaaga

SEQ ID NO: 36044 - DNA, 21 bp, Artificial Sequence
  Description of Artificial Sequence: Synthetic oligonucleotide
ccaggagacccaacacacgac

SEQ ID NO: 36045 - DNA, 21 bp, Artificial Sequence
  Description of Artificial Sequence: Synthetic oligonucleotide
ccaggagaagcaacaaaactc

SEQ ID NO: 36046 - DNA, 21 bp, Artificial Sequence
  Description of Artificial Sequence: Synthetic oligonucleotide
ccaggagaaaaactctggtgc

SEQ ID NO: 36047 - DNA, 21 bp, Artificial Sequence
  Description of Artificial Sequence: Synthetic oligonucleotide
ccaggagaaacacaagaagtc

SEQ ID NO: 36048 - DNA, 21 bp, Artificial Sequence
  Description of Artificial Sequence: Synthetic oligonucleotide
ccaggattcgacccaagcgga

SEQ ID NO: 36049 - DNA, 21 bp, Artificial Sequence
  Description of Artificial Sequence: Synthetic oligonucleotide
ccaggaggaagcgaccacagc

SEQ ID NO: 36050 - DNA, 21 bp, Artificial Sequence
  Description of Artificial Sequence: Synthetic oligonucleotide
ccaggaggaagcctcggagaa

SEQ ID NO: 36051 - DNA, 21 bp, Artificial Sequence
  Description of Artificial Sequence: Synthetic oligonucleotide
ccaggacacgacgtcgcaaga

SEQ ID NO: 36052 - DNA, 21 bp, Artificial Sequence
  Description of Artificial Sequence: Synthetic oligonucleotide
ccaggacacatgccagcaagc

SEQ ID NO: 36053 - DNA, 21 bp, Artificial Sequence
  Description of Artificial Sequence: Synthetic oligonucleotide
ccaggaatcgacgcaagaatc

SEQ ID NO: 36054 - DNA, 21 bp, Artificial Sequence
  Description of Artificial Sequence: Synthetic oligonucleotide
ccaggaatcgacagaaaaagc

SEQ ID NO: 36055 - DNA, 21 bp, Artificial Sequence
  Description of Artificial Sequence: Synthetic oligonucleotide
ccaggaatccaagcaccaatc

SEQ ID NO: 36056 - DNA, 21 bp, Artificial Sequence
  Description of Artificial Sequence: Synthetic oligonucleotide
ccaggaaaaatccacgcagca

SEQ ID NO: 36057 - DNA, 21 bp, Artificial Sequence
  Description of Artificial Sequence: Synthetic oligonucleotide
ccaggaaaactcctcaaccca

SEQ ID NO: 36058 - DNA, 21 bp, Artificial Sequence
  Description of Artificial Sequence: Synthetic oligonucleotide
ccaggaaaaagcctcgaagca

SEQ ID NO: 36059 - DNA, 21 bp, Artificial Sequence
  Description of Artificial Sequence: Synthetic oligonucleotide
ccaggaaaatacagcccaagc

SEQ ID NO: 36060 - DNA, 21 bp, Artificial Sequence
  Description of Artificial Sequence: Synthetic oligonucleotide
ccaggactcgcagactacgga

SEQ ID NO: 36061 - DNA, 21 bp, Artificial Sequence
  Description of Artificial Sequence: Synthetic oligonucleotide
ccaggactcctcgaccacgtc

SEQ ID NO: 36062 - DNA, 21 bp, Artificial Sequence
  Description of Artificial Sequence: Synthetic oligonucleotide
ccaggactccaaagcatgaaa

SEQ ID NO: 36063 - DNA, 21 bp, Artificial Sequence
  Description of Artificial Sequence: Synthetic oligonucleotide
ccaggactcagaagcgacagc

SEQ ID NO: 36064 - DNA, 21 bp, Artificial Sequence
  Description of Artificial Sequence: Synthetic oligonucleotide
ccaggactcacagcaaaccca

SEQ ID NO: 36065 - DNA, 21 bp, Artificial Sequence
  Description of Artificial Sequence: Synthetic oligonucleotide
ccaggactcacaaaagcaatc

SEQ ID NO: 36066 - DNA, 21 bp, Artificial Sequence
  Description of Artificial Sequence: Synthetic oligonucleotide
ccaggaatgagaatgggacaa

SEQ ID NO: 36067 - DNA, 21 bp, Artificial Sequence
  Description of Artificial Sequence: Synthetic oligonucleotide
ccaggaaaccacgtcacaaga

SEQ ID NO: 36068 - DNA, 21 bp, Artificial Sequence
  Description of Artificial Sequence: Synthetic oligonucleotide
ccaggaaactacgaatacaga

SEQ ID NO: 36069 - DNA, 21 bp, Artificial Sequence
  Description of Artificial Sequence: Synthetic oligonucleotide
ccaggaccaggacaaccaaga

SEQ ID NO: 36070 - DNA, 21 bp, Artificial Sequence
  Description of Artificial Sequence: Synthetic oligonucleotide
ccaggaccaatgaacagcagc

SEQ ID NO: 36071 - DNA, 21 bp, Artificial Sequence
  Description of Artificial Sequence: Synthetic oligonucleotide
ccaggaccaagaagagacatc

SEQ ID NO: 36072 - DNA, 21 bp, Artificial Sequence
  Description of Artificial Sequence: Synthetic oligonucleotide
ccaggaccaacaggagcatac

SEQ ID NO: 36073 - DNA, 21 bp, Artificial Sequence
  Description of Artificial Sequence: Synthetic oligonucleotide
ccaggacaagaaacaagctac

SEQ ID NO: 36074 - DNA, 21 bp, Artificial Sequence
  Description of Artificial Sequence: Synthetic oligonucleotide
ccaggacaacaaaaaaacatg

SEQ ID NO: 36075 - DNA, 21 bp, Artificial Sequence
  Description of Artificial Sequence: Synthetic oligonucleotide
ccaggacaaagaggaacacca

SEQ ID NO: 36076 - DNA, 21 bp, Artificial Sequence
  Description of Artificial Sequence: Synthetic oligonucleotide
ccaggacaaacacaacacaac

SEQ ID NO: 36077 - DNA, 21 bp, Artificial Sequence
  Description of Artificial Sequence: Synthetic oligonucleotide
ccaggaagagacgcagaagga

SEQ ID NO: 36078 - DNA, 21 bp, Artificial Sequence
  Description of Artificial Sequence: Synthetic oligonucleotide
ccaggaagagaaggagtcaca

SEQ ID NO: 36079 - DNA, 21 bp, Artificial Sequence
  Description of Artificial Sequence: Synthetic oligonucleotide
ccaggaagaccacaaccaagc

SEQ ID NO: 36080 - DNA, 21 bp, Artificial Sequence
  Description of Artificial Sequence: Synthetic oligonucleotide
ccaggaagagtcggaccactc

SEQ ID NO: 36081 - DNA, 21 bp, Artificial Sequence
  Description of Artificial Sequence: Synthetic oligonucleotide
ccaggaagcttcccaagagga

SEQ ID NO: 36082 - DNA, 21 bp, Artificial Sequence
  Description of Artificial Sequence: Synthetic oligonucleotide
ccaggaagcaacagcggacac

SEQ ID NO: 36083 - DNA, 21 bp, Artificial Sequence
  Description of Artificial Sequence: Synthetic oligonucleotide
ccaggaagccaagcagtccac

SEQ ID NO: 36084 - DNA, 21 bp, Artificial Sequence
  Description of Artificial Sequence: Synthetic oligonucleotide
ccaggaagccaaagaaacagc

SEQ ID NO: 36085 - DNA, 21 bp, Artificial Sequence
  Description of Artificial Sequence: Synthetic oligonucleotide
ccaggaagcagagcaccagga

SEQ ID NO: 36086 - DNA, 21 bp, Artificial Sequence
  Description of Artificial Sequence: Synthetic oligonucleotide
ccaggaacagcaagaacaaac

SEQ ID NO: 36087 - DNA, 21 bp, Artificial Sequence
  Description of Artificial Sequence: Synthetic oligonucleotide
ccaggaacaggaagatacgtc

SEQ ID NO: 36088 - DNA, 21 bp, Artificial Sequence
  Description of Artificial Sequence: Synthetic oligonucleotide
ccaggaacaccactccaaagc

SEQ ID NO: 36089 - DNA, 21 bp, Artificial Sequence
  Description of Artificial Sequence: Synthetic oligonucleotide
ccaggaacaagcagcacagga

SEQ ID NO: 36090 - DNA, 21 bp, Artificial Sequence
  Description of Artificial Sequence: Synthetic oligonucleotide
ccaggagtcaacccagcaatc

SEQ ID NO: 36091 - DNA, 21 bp, Artificial Sequence
  Description of Artificial Sequence: Synthetic oligonucleotide
ccaggagtcagaggaagccca

SEQ ID NO: 36092 - DNA, 21 bp, Artificial Sequence
  Description of Artificial Sequence: Synthetic oligonucleotide
ccaggagtcacagacagagga

SEQ ID NO: 36093 - DNA, 21 bp, Artificial Sequence
  Description of Artificial Sequence: Synthetic oligonucleotide
ccaggatacccagcagtcaca

SEQ ID NO: 36094 - DNA, 21 bp, Artificial Sequence
  Description of Artificial Sequence: Synthetic oligonucleotide
ccacacgcaaacagcagcctc

SEQ ID NO: 36095 - DNA, 21 bp, Artificial Sequence
  Description of Artificial Sequence: Synthetic oligonucleotide
ccacacgacagcccaacacca

SEQ ID NO: 36096 - DNA, 21 bp, Artificial Sequence
  Description of Artificial Sequence: Synthetic oligonucleotide
ccacacggagtcggagacgca

SEQ ID NO: 36097 - DNA, 21 bp, Artificial Sequence
  Description of Artificial Sequence: Synthetic oligonucleotide
ccacaccacgacgacgaaaac

SEQ ID NO: 36098 - DNA, 21 bp, Artificial Sequence
  Description of Artificial Sequence: Synthetic oligonucleotide
ccacacctcgaatgcggaatg

SEQ ID NO: 36099 - DNA, 21 bp, Artificial Sequence
  Description of Artificial Sequence: Synthetic oligonucleotide
ccacacctcggagtcagcaca

SEQ ID NO: 36100 - DNA, 21 bp, Artificial Sequence
  Description of Artificial Sequence: Synthetic oligonucleotide
ccacacctccacaacggactc

SEQ ID NO: 36101 - DNA, 21 bp, Artificial Sequence
  Description of Artificial Sequence: Synthetic oligonucleotide
ccacacctcaaaatcgcagca

SEQ ID NO: 36102 - DNA, 21 bp, Artificial Sequence
  Description of Artificial Sequence: Synthetic oligonucleotide
ccacacctcccagaccacgca

SEQ ID NO: 36103 - DNA, 21 bp, Artificial Sequence
  Description of Artificial Sequence: Synthetic oligonucleotide
ccacacctcccaccagcaaac

SEQ ID NO: 36104 - DNA, 21 bp, Artificial Sequence
  Description of Artificial Sequence: Synthetic oligonucleotide
ccacacctcccacaaaacatg

SEQ ID NO: 36105 - DNA, 21 bp, Artificial Sequence
  Description of Artificial Sequence: Synthetic oligonucleotide
ccacacctcagcgcaaacgca

SEQ ID NO: 36106 - DNA, 21 bp, Artificial Sequence
  Description of Artificial Sequence: Synthetic oligonucleotide
ccacacatgggaagagcagac

SEQ ID NO: 36107 - DNA, 21 bp, Artificial Sequence
  Description of Artificial Sequence: Synthetic oligonucleotide
ccacacaacagcacagacaca

SEQ ID NO: 36108 - DNA, 21 bp, Artificial Sequence
  Description of Artificial Sequence: Synthetic oligonucleotide
ccacacccaaacagcagccca

SEQ ID NO: 36109 - DNA, 21 bp, Artificial Sequence
  Description of Artificial Sequence: Synthetic oligonucleotide
ccacacccaccagaacaaagc

SEQ ID NO: 36110 - DNA, 21 bp, Artificial Sequence
  Description of Artificial Sequence: Synthetic oligonucleotide
ccacacccaccaagcaacaga

SEQ ID NO: 36111 - DNA, 21 bp, Artificial Sequence
  Description of Artificial Sequence: Synthetic oligonucleotide
ccacacccaagcgcacaagga

SEQ ID NO: 36112 - DNA, 21 bp, Artificial Sequence
  Description of Artificial Sequence: Synthetic oligonucleotide
ccacacccaagcagcatccca

SEQ ID NO: 36113 - DNA, 21 bp, Artificial Sequence
  Description of Artificial Sequence: Synthetic oligonucleotide
ccacaccaaagcatcccacca

SEQ ID NO: 36114 - DNA, 21 bp, Artificial Sequence
  Description of Artificial Sequence: Synthetic oligonucleotide
ccacacagagaatacgtcgtc

SEQ ID NO: 36115 - DNA, 21 bp, Artificial Sequence
  Description of Artificial Sequence: Synthetic oligonucleotide
ccacacagaccaagcaacagc

SEQ ID NO: 36116 - DNA, 21 bp, Artificial Sequence
  Description of Artificial Sequence: Synthetic oligonucleotide
ccacacagaccaacagtcgtc

SEQ ID NO: 36117 - DNA, 21 bp, Artificial Sequence
  Description of Artificial Sequence: Synthetic oligonucleotide
ccacacagagtcagcgtcagc

SEQ ID NO: 36118 - DNA, 21 bp, Artificial Sequence
  Description of Artificial Sequence: Synthetic oligonucleotide
ccacacagcaacatgaacagc

SEQ ID NO: 36119 - DNA, 21 bp, Artificial Sequence
  Description of Artificial Sequence: Synthetic oligonucleotide
ccacacagcagcaaagaaatg

SEQ ID NO: 36120 - DNA, 21 bp, Artificial Sequence
  Description of Artificial Sequence: Synthetic oligonucleotide
ccacacagcagcatgctcctc

SEQ ID NO: 36121 - DNA, 21 bp, Artificial Sequence
  Description of Artificial Sequence: Synthetic oligonucleotide
ccacacacaggatacacagac

SEQ ID NO: 36122 - DNA, 21 bp, Artificial Sequence
  Description of Artificial Sequence: Synthetic oligonucleotide
ccacacacactcgtcacaaga

SEQ ID NO: 36123 - DNA, 21 bp, Artificial Sequence
  Description of Artificial Sequence: Synthetic oligonucleotide
ccacacacaagcccaccaagc

SEQ ID NO: 36124 - DNA, 21 bp, Artificial Sequence
  Description of Artificial Sequence: Synthetic oligonucleotide
ccaatcgcaagagaatacgga

SEQ ID NO: 36125 - DNA, 21 bp, Artificial Sequence
  Description of Artificial Sequence: Synthetic oligonucleotide
ccaatcgcaagaggagacttc

SEQ ID NO: 36126 - DNA, 21 bp, Artificial Sequence
  Description of Artificial Sequence: Synthetic oligonucleotide
ccaatcgacagagaatacgca

SEQ ID NO: 36127 - DNA, 21 bp, Artificial Sequence
  Description of Artificial Sequence: Synthetic oligonucleotide
ccaatcgacacaggaagagaa

SEQ ID NO: 36128 - DNA, 21 bp, Artificial Sequence
  Description of Artificial Sequence: Synthetic oligonucleotide
ccaatcgactacggagtcgaa

SEQ ID NO: 36129 - DNA, 21 bp, Artificial Sequence
  Description of Artificial Sequence: Synthetic oligonucleotide
ccaatcgaaggaagaagagtc

SEQ ID NO: 36130 - DNA, 21 bp, Artificial Sequence
  Description of Artificial Sequence: Synthetic oligonucleotide
ccaatcgaaagaacactccca

SEQ ID NO: 36131 - DNA, 21 bp, Artificial Sequence
  Description of Artificial Sequence: Synthetic oligonucleotide
ccaatcggaccaccaaacagc

SEQ ID NO: 36132 - DNA, 21 bp, Artificial Sequence
  Description of Artificial Sequence: Synthetic oligonucleotide
ccaatcggaagcatgctcagc

SEQ ID NO: 36133 - DNA, 21 bp, Artificial Sequence
  Description of Artificial Sequence: Synthetic oligonucleotide
ccaatcggaagcaacggaaaa

SEQ ID NO: 36134 - DNA, 21 bp, Artificial Sequence
  Description of Artificial Sequence: Synthetic oligonucleotide
ccaatcggagtccaagaaaaa

SEQ ID NO: 36135 - DNA, 21 bp, Artificial Sequence
  Description of Artificial Sequence: Synthetic oligonucleotide
ccaatccacatcagcagcgtc

SEQ ID NO: 36136 - DNA, 21 bp, Artificial Sequence
  Description of Artificial Sequence: Synthetic oligonucleotide
ccaatccactacagccaagac

SEQ ID NO: 36137 - DNA, 21 bp, Artificial Sequence
  Description of Artificial Sequence: Synthetic oligonucleotide
ccaatcatgggacaaaaaagc

SEQ ID NO: 36138 - DNA, 21 bp, Artificial Sequence
  Description of Artificial Sequence: Synthetic oligonucleotide
ccaatcaacgacagcagcagc

SEQ ID NO: 36139 - DNA, 21 bp, Artificial Sequence
  Description of Artificial Sequence: Synthetic oligonucleotide
ccaatcaacatgagaggacca

SEQ ID NO: 36140 - DNA, 21 bp, Artificial Sequence
  Description of Artificial Sequence: Synthetic oligonucleotide
ccaatcccagacaaaagcagc

SEQ ID NO: 36141 - DNA, 21 bp, Artificial Sequence
  Description of Artificial Sequence: Synthetic oligonucleotide
ccaatcccaggaccaggaaaa

SEQ ID NO: 36142 - DNA, 21 bp, Artificial Sequence
  Description of Artificial Sequence: Synthetic oligonucleotide
ccaatcccaaacaaaggagga

SEQ ID NO: 36143 - DNA, 21 bp, Artificial Sequence
  Description of Artificial Sequence: Synthetic oligonucleotide
ccaatccaaacaagaacatac

SEQ ID NO: 36144 - DNA, 21 bp, Artificial Sequence
  Description of Artificial Sequence: Synthetic oligonucleotide
ccaatcagagcagcagcaagc

SEQ ID NO: 36145 - DNA, 21 bp, Artificial Sequence
  Description of Artificial Sequence: Synthetic oligonucleotide
ccaatcagagcagaagcagtc

SEQ ID NO: 36146 - DNA, 21 bp, Artificial Sequence
  Description of Artificial Sequence: Synthetic oligonucleotide
ccaatcagcgaattcaacgca

SEQ ID NO: 36147 - DNA, 21 bp, Artificial Sequence
  Description of Artificial Sequence: Synthetic oligonucleotide
ccaatcagcctcagcatgcca

SEQ ID NO: 36148 - DNA, 21 bp, Artificial Sequence
  Description of Artificial Sequence: Synthetic oligonucleotide
ccaatcagcccactcagctac

SEQ ID NO: 36149 - DNA, 21 bp, Artificial Sequence
  Description of Artificial Sequence: Synthetic oligonucleotide
ccaatcagccaaggaagactc

SEQ ID NO: 36150 - DNA, 21 bp, Artificial Sequence
  Description of Artificial Sequence: Synthetic oligonucleotide
ccaatcagcagcaaaagcagc

SEQ ID NO: 36151 - DNA, 21 bp, Artificial Sequence
  Description of Artificial Sequence: Synthetic oligonucleotide
ccaatcagcacactcctcgca

SEQ ID NO: 36152 - DNA, 21 bp, Artificial Sequence
  Description of Artificial Sequence: Synthetic oligonucleotide
ccaatcacaaacccaagaatc

SEQ ID NO: 36153 - DNA, 21 bp, Artificial Sequence
  Description of Artificial Sequence: Synthetic oligonucleotide
ccaatcacaaacagcaacatc

SEQ ID NO: 36154 - DNA, 21 bp, Artificial Sequence
  Description of Artificial Sequence: Synthetic oligonucleotide
ccaatcacaaactacagcagc

SEQ ID NO: 36155 - DNA, 21 bp, Artificial Sequence
  Description of Artificial Sequence: Synthetic oligonucleotide
ccaatcacaccaggaaacgaa

SEQ ID NO: 36156 - DNA, 21 bp, Artificial Sequence
  Description of Artificial Sequence: Synthetic oligonucleotide
ccaatcacaacagtcccagca

SEQ ID NO: 36157 - DNA, 21 bp, Artificial Sequence
  Description of Artificial Sequence: Synthetic oligonucleotide
ccaatcgtcggaagccacgaa

SEQ ID NO: 36158 - DNA, 21 bp, Artificial Sequence
  Description of Artificial Sequence: Synthetic oligonucleotide
ccaatcgtcccagtcagcgca

SEQ ID NO: 36159 - DNA, 21 bp, Artificial Sequence
  Description of Artificial Sequence: Synthetic oligonucleotide
ccaatcgtcacacacgcactc

SEQ ID NO: 36160 - DNA, 21 bp, Artificial Sequence
  Description of Artificial Sequence: Synthetic oligonucleotide
ccaatctacaaaggaacagga

SEQ ID NO: 36161 - DNA, 21 bp, Artificial Sequence
  Description of Artificial Sequence: Synthetic oligonucleotide
ccaaaagcagcaccaaacttc

SEQ ID NO: 36162 - DNA, 21 bp, Artificial Sequence
  Description of Artificial Sequence: Synthetic oligonucleotide
ccaaaagcaatcctcccaagc

SEQ ID NO: 36163 - DNA, 21 bp, Artificial Sequence
  Description of Artificial Sequence: Synthetic oligonucleotide
ccaaaagcaagcgactggcac

SEQ ID NO: 36164 - DNA, 21 bp, Artificial Sequence
  Description of Artificial Sequence: Synthetic oligonucleotide
ccaaaagacgacggacaaaac

SEQ ID NO: 36165 - DNA, 21 bp, Artificial Sequence
  Description of Artificial Sequence: Synthetic oligonucleotide
ccaaaagacatcagagaattc

SEQ ID NO: 36166 - DNA, 21 bp, Artificial Sequence
  Description of Artificial Sequence: Synthetic oligonucleotide
ccaaaagacagaaacccagtc

SEQ ID NO: 36167 - DNA, 21 bp, Artificial Sequence
  Description of Artificial Sequence: Synthetic oligonucleotide
ccaaaagacagcagcagaaca

SEQ ID NO: 36168 - DNA, 21 bp, Artificial Sequence
  Description of Artificial Sequence: Synthetic oligonucleotide
ccaaaagaaagaacacacctc

SEQ ID NO: 36169 - DNA, 21 bp, Artificial Sequence
  Description of Artificial Sequence: Synthetic oligonucleotide
ccaaaattcggaggagtcagc

SEQ ID NO: 36170 - DNA, 21 bp, Artificial Sequence
  Description of Artificial Sequence: Synthetic oligonucleotide
ccaaaaggagcagcaacaatg

SEQ ID NO: 36171 - DNA, 21 bp, Artificial Sequence
  Description of Artificial Sequence: Synthetic oligonucleotide
ccaaaaggagaaacaggaaga

SEQ ID NO: 36172 - DNA, 21 bp, Artificial Sequence
  Description of Artificial Sequence: Synthetic oligonucleotide
ccaaaaggaacacacttcgga

SEQ ID NO: 36173 - DNA, 21 bp, Artificial Sequence
  Description of Artificial Sequence: Synthetic oligonucleotide
ccaaaaggatacggagcaagc

SEQ ID NO: 36174 - DNA, 21 bp, Artificial Sequence
  Description of Artificial Sequence: Synthetic oligonucleotide
ccaaaaatcagcacactcgga

SEQ ID NO: 36175 - DNA, 21 bp, Artificial Sequence
  Description of Artificial Sequence: Synthetic oligonucleotide
ccaaaaaaagacccagtccca

SEQ ID NO: 36176 - DNA, 21 bp, Artificial Sequence
  Description of Artificial Sequence: Synthetic oligonucleotide
ccaaaactcaaagacgtcaca

SEQ ID NO: 36177 - DNA, 21 bp, Artificial Sequence
  Description of Artificial Sequence: Synthetic oligonucleotide
ccaaaactcagcagcagcaca

SEQ ID NO: 36178 - DNA, 21 bp, Artificial Sequence
  Description of Artificial Sequence: Synthetic oligonucleotide
ccaaaactctacgacatgatg

SEQ ID NO: 36179 - DNA, 21 bp, Artificial Sequence
  Description of Artificial Sequence: Synthetic oligonucleotide
ccaaaaatggacgacaaaaac

SEQ ID NO: 36180 - DNA, 21 bp, Artificial Sequence
  Description of Artificial Sequence: Synthetic oligonucleotide
ccaaaaatgctcgtcacagga

SEQ ID NO: 36181 - DNA, 21 bp, Artificial Sequence
  Description of Artificial Sequence: Synthetic oligonucleotide
ccaaaaatgacaggagcaaga

SEQ ID NO: 36182 - DNA, 21 bp, Artificial Sequence
  Description of Artificial Sequence: Synthetic oligonucleotide
ccaaaaaacatggtcccacca

SEQ ID NO: 36183 - DNA, 21 bp, Artificial Sequence
  Description of Artificial Sequence: Synthetic oligonucleotide
ccaaaaccagaattcgcaagc

SEQ ID NO: 36184 - DNA, 21 bp, Artificial Sequence
  Description of Artificial Sequence: Synthetic oligonucleotide
ccaaaaccagaattcctcgca

SEQ ID NO: 36185 - DNA, 21 bp, Artificial Sequence
  Description of Artificial Sequence: Synthetic oligonucleotide
ccaaaaccagaaccacacgca

SEQ ID NO: 36186 - DNA, 21 bp, Artificial Sequence
  Description of Artificial Sequence: Synthetic oligonucleotide
ccaaaaccaatcacagtcaca

SEQ ID NO: 36187 - DNA, 21 bp, Artificial Sequence
  Description of Artificial Sequence: Synthetic oligonucleotide
ccaaaaccaccaaacctcctc

SEQ ID NO: 36188 - DNA, 21 bp, Artificial Sequence
  Description of Artificial Sequence: Synthetic oligonucleotide
ccaaaaccaccaagcctcgga

SEQ ID NO: 36189 - DNA, 21 bp, Artificial Sequence
  Description of Artificial Sequence: Synthetic oligonucleotide
ccaaaacaagaaagctacgca

SEQ ID NO: 36190 - DNA, 21 bp, Artificial Sequence
  Description of Artificial Sequence: Synthetic oligonucleotide
ccaaaaagcatggacggatac

SEQ ID NO: 36191 - DNA, 21 bp, Artificial Sequence
  Description of Artificial Sequence: Synthetic oligonucleotide
ccaaaaagcaactactaccca

SEQ ID NO: 36192 - DNA, 21 bp, Artificial Sequence
  Description of Artificial Sequence: Synthetic oligonucleotide
ccaaaaacacacgtcctcagc

SEQ ID NO: 36193 - DNA, 21 bp, Artificial Sequence
  Description of Artificial Sequence: Synthetic oligonucleotide
ccaaaaacatacgaaacagtc

SEQ ID NO: 36194 - DNA, 21 bp, Artificial Sequence
  Description of Artificial Sequence: Synthetic oligonucleotide
ccactcgcagcaggaagcgtc

SEQ ID NO: 36195 - DNA, 21 bp, Artificial Sequence
  Description of Artificial Sequence: Synthetic oligonucleotide
ccactcgcaggaccactcaca

SEQ ID NO: 36196 - DNA, 21 bp, Artificial Sequence
  Description of Artificial Sequence: Synthetic oligonucleotide
ccactcgcacacacaacaagc

SEQ ID NO: 36197 - DNA, 21 bp, Artificial Sequence
  Description of Artificial Sequence: Synthetic oligonucleotide
ccactcgcaagagaagaactc

SEQ ID NO: 36198 - DNA, 21 bp, Artificial Sequence
  Description of Artificial Sequence: Synthetic oligonucleotide
ccactcgcaagcccaatccca

SEQ ID NO: 36199 - DNA, 21 bp, Artificial Sequence
  Description of Artificial Sequence: Synthetic oligonucleotide
ccactcgcaagcacataccca

SEQ ID NO: 36200 - DNA, 21 bp, Artificial Sequence
  Description of Artificial Sequence: Synthetic oligonucleotide
ccactcgacgcaaaaatgtac

SEQ ID NO: 36201 - DNA, 21 bp, Artificial Sequence
  Description of Artificial Sequence: Synthetic oligonucleotide
ccactcgacgacaaaccattc

SEQ ID NO: 36202 - DNA, 21 bp, Artificial Sequence
  Description of Artificial Sequence: Synthetic oligonucleotide
ccactcgacccaggaatcctc

SEQ ID NO: 36203 - DNA, 21 bp, Artificial Sequence
  Description of Artificial Sequence: Synthetic oligonucleotide
ccactcgacagcaacgtcgtc

SEQ ID NO: 36204 - DNA, 21 bp, Artificial Sequence
  Description of Artificial Sequence: Synthetic oligonucleotide
ccactcgacacaagattcagc

SEQ ID NO: 36205 - DNA, 21 bp, Artificial Sequence
  Description of Artificial Sequence: Synthetic oligonucleotide
ccactcgactacagaaaagga

SEQ ID NO: 36206 - DNA, 21 bp, Artificial Sequence
  Description of Artificial Sequence: Synthetic oligonucleotide
ccactcgaaaaaagcagcttc

SEQ ID NO: 36207 - DNA, 21 bp, Artificial Sequence
  Description of Artificial Sequence: Synthetic oligonucleotide
ccactcgaaagcgtcgacatc

SEQ ID NO: 36208 - DNA, 21 bp, Artificial Sequence
  Description of Artificial Sequence: Synthetic oligonucleotide
ccactcttcaacggaagcgca

SEQ ID NO: 36209 - DNA, 21 bp, Artificial Sequence
  Description of Artificial Sequence: Synthetic oligonucleotide
ccactcggagcaggaaaaagc

SEQ ID NO: 36210 - DNA, 21 bp, Artificial Sequence
  Description of Artificial Sequence: Synthetic oligonucleotide
ccactcggagcacaacacctc

SEQ ID NO: 36211 - DNA, 21 bp, Artificial Sequence
  Description of Artificial Sequence: Synthetic oligonucleotide
ccactcggagacgcatgggga

SEQ ID NO: 36212 - DNA, 21 bp, Artificial Sequence
  Description of Artificial Sequence: Synthetic oligonucleotide
ccactcggaatggtccacaca

SEQ ID NO: 36213 - DNA, 21 bp, Artificial Sequence
  Description of Artificial Sequence: Synthetic oligonucleotide
ccactccacatgacaacaatg

SEQ ID NO: 36214 - DNA, 21 bp, Artificial Sequence
  Description of Artificial Sequence: Synthetic oligonucleotide
ccactccacaacagagtccca

SEQ ID NO: 36215 - DNA, 21 bp, Artificial Sequence
  Description of Artificial Sequence: Synthetic oligonucleotide
ccactccacagagcaaacaca

SEQ ID NO: 36216 - DNA, 21 bp, Artificial Sequence
  Description of Artificial Sequence: Synthetic oligonucleotide
ccactccacagaacactcgac

SEQ ID NO: 36217 - DNA, 21 bp, Artificial Sequence
  Description of Artificial Sequence: Synthetic oligonucleotide
ccactcatcgcagtcccaaca

SEQ ID NO: 36218 - DNA, 21 bp, Artificial Sequence
  Description of Artificial Sequence: Synthetic oligonucleotide
ccactcatcggaaaaccaaac

SEQ ID NO: 36219 - DNA, 21 bp, Artificial Sequence
  Description of Artificial Sequence: Synthetic oligonucleotide
ccactcatcacaccagacctc

SEQ ID NO: 36220 - DNA, 21 bp, Artificial Sequence
  Description of Artificial Sequence: Synthetic oligonucleotide
ccactcaaagcacacatgatg

SEQ ID NO: 36221 - DNA, 21 bp, Artificial Sequence
  Description of Artificial Sequence: Synthetic oligonucleotide
ccactcaaagcaagcggaatg

SEQ ID NO: 36222 - DNA, 21 bp, Artificial Sequence
  Description of Artificial Sequence: Synthetic oligonucleotide
ccactcaaactcagctacgga

SEQ ID NO: 36223 - DNA, 21 bp, Artificial Sequence
  Description of Artificial Sequence: Synthetic oligonucleotide
ccactcaaagtcagcgcaagc

SEQ ID NO: 36224 - DNA, 21 bp, Artificial Sequence
  Description of Artificial Sequence: Synthetic oligonucleotide
ccactcctcgacagccacagc

SEQ ID NO: 36225 - DNA, 21 bp, Artificial Sequence
  Description of Artificial Sequence: Synthetic oligonucleotide
ccactcctcgaacacagagga

SEQ ID NO: 36226 - DNA, 21 bp, Artificial Sequence
  Description of Artificial Sequence: Synthetic oligonucleotide
ccactcctccacgacaaaatc

SEQ ID NO: 36227 - DNA, 21 bp, Artificial Sequence
  Description of Artificial Sequence: Synthetic oligonucleotide
ccactcaacgcagcaccattc

SEQ ID NO: 36228 - DNA, 21 bp, Artificial Sequence
  Description of Artificial Sequence: Synthetic oligonucleotide
ccactcaacggagacgcacca

SEQ ID NO: 36229 - DNA, 21 bp, Artificial Sequence
  Description of Artificial Sequence: Synthetic oligonucleotide
ccactcaacccaagcacagga

SEQ ID NO: 36230 - DNA, 21 bp, Artificial Sequence
  Description of Artificial Sequence: Synthetic oligonucleotide
ccactcaacgtcagaacagtc

SEQ ID NO: 36231 - DNA, 21 bp, Artificial Sequence
  Description of Artificial Sequence: Synthetic oligonucleotide
ccactcccagactacctcgtc

SEQ ID NO: 36232 - DNA, 21 bp, Artificial Sequence
  Description of Artificial Sequence: Synthetic oligonucleotide
ccactcccaggaaacgtcgga

SEQ ID NO: 36233 - DNA, 21 bp, Artificial Sequence
  Description of Artificial Sequence: Synthetic oligonucleotide
ccactcccactcagaacagga

SEQ ID NO: 36234 - DNA, 21 bp, Artificial Sequence
  Description of Artificial Sequence: Synthetic oligonucleotide
ccactcccaccaccagaagca

SEQ ID NO: 36235 - DNA, 21 bp, Artificial Sequence
  Description of Artificial Sequence: Synthetic oligonucleotide
ccactcccaagactcgcaagc

SEQ ID NO: 36236 - DNA, 21 bp, Artificial Sequence
  Description of Artificial Sequence: Synthetic oligonucleotide
ccactcccaagcgacggacac

SEQ ID NO: 36237 - DNA, 21 bp, Artificial Sequence
  Description of Artificial Sequence: Synthetic oligonucleotide
ccactcccagtcagcagaagc

SEQ ID NO: 36238 - DNA, 21 bp, Artificial Sequence
  Description of Artificial Sequence: Synthetic oligonucleotide
ccactccaaagccaaacagtc

SEQ ID NO: 36239 - DNA, 21 bp, Artificial Sequence
  Description of Artificial Sequence: Synthetic oligonucleotide
ccactccaaagcagccaattc

SEQ ID NO: 36240 - DNA, 21 bp, Artificial Sequence
  Description of Artificial Sequence: Synthetic oligonucleotide
ccactccaaacaatgacactc

SEQ ID NO: 36241 - DNA, 21 bp, Artificial Sequence
  Description of Artificial Sequence: Synthetic oligonucleotide
ccactccaagtcagactcagc

SEQ ID NO: 36242 - DNA, 21 bp, Artificial Sequence
  Description of Artificial Sequence: Synthetic oligonucleotide
ccactcagagacggactcgtc

SEQ ID NO: 36243 - DNA, 21 bp, Artificial Sequence
  Description of Artificial Sequence: Synthetic oligonucleotide
ccactcagactcacaagcgac

SEQ ID NO: 36244 - DNA, 21 bp, Artificial Sequence
  Description of Artificial Sequence: Synthetic oligonucleotide
ccactcagaccaggacaactc

SEQ ID NO: 36245 - DNA, 21 bp, Artificial Sequence
  Description of Artificial Sequence: Synthetic oligonucleotide
ccactcagagtcagcacacca

SEQ ID NO: 36246 - DNA, 21 bp, Artificial Sequence
  Description of Artificial Sequence: Synthetic oligonucleotide
ccactcagcgcaatcaacagc

SEQ ID NO: 36247 - DNA, 21 bp, Artificial Sequence
  Description of Artificial Sequence: Synthetic oligonucleotide
ccactcagcgacgcaatgagc

SEQ ID NO: 36248 - DNA, 21 bp, Artificial Sequence
  Description of Artificial Sequence: Synthetic oligonucleotide
ccactcagcgacccaaacatc

SEQ ID NO: 36249 - DNA, 21 bp, Artificial Sequence
  Description of Artificial Sequence: Synthetic oligonucleotide
ccactcagcgaagacaaaaga

SEQ ID NO: 36250 - DNA, 21 bp, Artificial Sequence
  Description of Artificial Sequence: Synthetic oligonucleotide
ccactcagcttcacagtcgca

SEQ ID NO: 36251 - DNA, 21 bp, Artificial Sequence
  Description of Artificial Sequence: Synthetic oligonucleotide
ccactcagcatgatggaacca

SEQ ID NO: 36252 - DNA, 21 bp, Artificial Sequence
  Description of Artificial Sequence: Synthetic oligonucleotide
ccactcagcatgagaccagac

SEQ ID NO: 36253 - DNA, 21 bp, Artificial Sequence
  Description of Artificial Sequence: Synthetic oligonucleotide
ccactcagcaacctccaacca

SEQ ID NO: 36254 - DNA, 21 bp, Artificial Sequence
  Description of Artificial Sequence: Synthetic oligonucleotide
ccactcagcccagcaggagca

SEQ ID NO: 36255 - DNA, 21 bp, Artificial Sequence
  Description of Artificial Sequence: Synthetic oligonucleotide
ccactcagcccaatcagaaac

SEQ ID NO: 36256 - DNA, 21 bp, Artificial Sequence
  Description of Artificial Sequence: Synthetic oligonucleotide
ccactcagcccaacatggaaa

SEQ ID NO: 36257 - DNA, 21 bp, Artificial Sequence
  Description of Artificial Sequence: Synthetic oligonucleotide
ccactcagcagaaaccaaatc

SEQ ID NO: 36258 - DNA, 21 bp, Artificial Sequence
  Description of Artificial Sequence: Synthetic oligonucleotide
ccactcagcagcgcagcagga

SEQ ID NO: 36259 - DNA, 21 bp, Artificial Sequence
  Description of Artificial Sequence: Synthetic oligonucleotide
ccactcagcagcggaggaatg

SEQ ID NO: 36260 - DNA, 21 bp, Artificial Sequence
  Description of Artificial Sequence: Synthetic oligonucleotide
ccactcagcagcccagcaaga

SEQ ID NO: 36261 - DNA, 21 bp, Artificial Sequence
  Description of Artificial Sequence: Synthetic oligonucleotide
ccactcagcagcccaaacgga

SEQ ID NO: 36262 - DNA, 21 bp, Artificial Sequence
  Description of Artificial Sequence: Synthetic oligonucleotide
ccactcagcagcacactcgga

SEQ ID NO: 36263 - DNA, 21 bp, Artificial Sequence
  Description of Artificial Sequence: Synthetic oligonucleotide
ccactcagcacaaacagcaca

SEQ ID NO: 36264 - DNA, 21 bp, Artificial Sequence
  Description of Artificial Sequence: Synthetic oligonucleotide
ccactcagctaccaaaaaaac

SEQ ID NO: 36265 - DNA, 21 bp, Artificial Sequence
  Description of Artificial Sequence: Synthetic oligonucleotide
ccactcacagcaggactcgca

SEQ ID NO: 36266 - DNA, 21 bp, Artificial Sequence
  Description of Artificial Sequence: Synthetic oligonucleotide
ccactcacagcacacgtcagc

SEQ ID NO: 36267 - DNA, 21 bp, Artificial Sequence
  Description of Artificial Sequence: Synthetic oligonucleotide
ccactcacacaagcagtccca

SEQ ID NO: 36268 - DNA, 21 bp, Artificial Sequence
  Description of Artificial Sequence: Synthetic oligonucleotide
ccactcacaagcctcaaactc

SEQ ID NO: 36269 - DNA, 21 bp, Artificial Sequence
  Description of Artificial Sequence: Synthetic oligonucleotide
ccactcacaagcgtcgcacca

SEQ ID NO: 36270 - DNA, 21 bp, Artificial Sequence
  Description of Artificial Sequence: Synthetic oligonucleotide
ccactcacaacaagaaaccaa

SEQ ID NO: 36271 - DNA, 21 bp, Artificial Sequence
  Description of Artificial Sequence: Synthetic oligonucleotide
ccactcgtcgcaatcagcaca

SEQ ID NO: 36272 - DNA, 21 bp, Artificial Sequence
  Description of Artificial Sequence: Synthetic oligonucleotide
ccactcgtcctcagcagccac

SEQ ID NO: 36273 - DNA, 21 bp, Artificial Sequence
  Description of Artificial Sequence: Synthetic oligonucleotide
ccactcgtcagaggagacagc

SEQ ID NO: 36274 - DNA, 21 bp, Artificial Sequence
  Description of Artificial Sequence: Synthetic oligonucleotide
ccactcgtcagcacaggaatc

SEQ ID NO: 36275 - DNA, 21 bp, Artificial Sequence
  Description of Artificial Sequence: Synthetic oligonucleotide
ccactcgtcacaatggcaagc

SEQ ID NO: 36276 - DNA, 21 bp, Artificial Sequence
  Description of Artificial Sequence: Synthetic oligonucleotide
ccaatggcaccaccagtccaa

SEQ ID NO: 36277 - DNA, 21 bp, Artificial Sequence
  Description of Artificial Sequence: Synthetic oligonucleotide
ccaatggcacaagtcgcacca

SEQ ID NO: 36278 - DNA, 21 bp, Artificial Sequence
  Description of Artificial Sequence: Synthetic oligonucleotide
ccaatggaaagaacacacatg

SEQ ID NO: 36279 - DNA, 21 bp, Artificial Sequence
  Description of Artificial Sequence: Synthetic oligonucleotide
ccaatgggacaccaaagcgca

SEQ ID NO: 36280 - DNA, 21 bp, Artificial Sequence
  Description of Artificial Sequence: Synthetic oligonucleotide
ccaatgatcaacagcagcatg

SEQ ID NO: 36281 - DNA, 21 bp, Artificial Sequence
  Description of Artificial Sequence: Synthetic oligonucleotide
ccaatgaaagcaagcagccca

SEQ ID NO: 36282 - DNA, 21 bp, Artificial Sequence
  Description of Artificial Sequence: Synthetic oligonucleotide
ccaatgaaaggaagcgtctac

SEQ ID NO: 36283 - DNA, 21 bp, Artificial Sequence
  Description of Artificial Sequence: Synthetic oligonucleotide
ccaatgaaaatgggaccagga

SEQ ID NO: 36284 - DNA, 21 bp, Artificial Sequence
  Description of Artificial Sequence: Synthetic oligonucleotide
ccaatgatgcaaacaccaaaa

SEQ ID NO: 36285 - DNA, 21 bp, Artificial Sequence
  Description of Artificial Sequence: Synthetic oligonucleotide
ccaatgaacagaggaaaagaa

SEQ ID NO: 36286 - DNA, 21 bp, Artificial Sequence
  Description of Artificial Sequence: Synthetic oligonucleotide
ccaatgaacacaaacgtcagc

SEQ ID NO: 36287 - DNA, 21 bp, Artificial Sequence
  Description of Artificial Sequence: Synthetic oligonucleotide
ccaatgccagcaagcgacttc

SEQ ID NO: 36288 - DNA, 21 bp, Artificial Sequence
  Description of Artificial Sequence: Synthetic oligonucleotide
ccaatgccagaattcaacgga

SEQ ID NO: 36289 - DNA, 21 bp, Artificial Sequence
  Description of Artificial Sequence: Synthetic oligonucleotide
ccaatgccagaaatggcagga

SEQ ID NO: 36290 - DNA, 21 bp, Artificial Sequence
  Description of Artificial Sequence: Synthetic oligonucleotide
ccaatgccagtcagagcagtc

SEQ ID NO: 36291 - DNA, 21 bp, Artificial Sequence
  Description of Artificial Sequence: Synthetic oligonucleotide
ccaatgagaggaagcacactc

SEQ ID NO: 36292 - DNA, 21 bp, Artificial Sequence
  Description of Artificial Sequence: Synthetic oligonucleotide
ccaatgagaaaccaagtcgac

SEQ ID NO: 36293 - DNA, 21 bp, Artificial Sequence
  Description of Artificial Sequence: Synthetic oligonucleotide
ccaatgagacaaatcaacgac

SEQ ID NO: 36294 - DNA, 21 bp, Artificial Sequence
  Description of Artificial Sequence: Synthetic oligonucleotide
ccaatgagcgaactcacacca

SEQ ID NO: 36295 - DNA, 21 bp, Artificial Sequence
  Description of Artificial Sequence: Synthetic oligonucleotide
ccaatgagcggaccaagcatg

SEQ ID NO: 36296 - DNA, 21 bp, Artificial Sequence
  Description of Artificial Sequence: Synthetic oligonucleotide
ccaatgagcggaagcaacgca

SEQ ID NO: 36297 - DNA, 21 bp, Artificial Sequence
  Description of Artificial Sequence: Synthetic oligonucleotide
ccaatgagccacatggcacca

SEQ ID NO: 36298 - DNA, 21 bp, Artificial Sequence
  Description of Artificial Sequence: Synthetic oligonucleotide
ccaatgagcctcccactcagc

SEQ ID NO: 36299 - DNA, 21 bp, Artificial Sequence
  Description of Artificial Sequence: Synthetic oligonucleotide
ccaatgagcatgaaagaacca

SEQ ID NO: 36300 - DNA, 21 bp, Artificial Sequence
  Description of Artificial Sequence: Synthetic oligonucleotide
ccaatgagccaaacaccagga

SEQ ID NO: 36301 - DNA, 21 bp, Artificial Sequence
  Description of Artificial Sequence: Synthetic oligonucleotide
ccaatgagccaaacaacaagc

SEQ ID NO: 36302 - DNA, 21 bp, Artificial Sequence
  Description of Artificial Sequence: Synthetic oligonucleotide
ccaatgagcagcccactcaaa

SEQ ID NO: 36303 - DNA, 21 bp, Artificial Sequence
  Description of Artificial Sequence: Synthetic oligonucleotide
ccaatgagcagcagagtcgtc

SEQ ID NO: 36304 - DNA, 21 bp, Artificial Sequence
  Description of Artificial Sequence: Synthetic oligonucleotide
ccaatgagcacaagcacacca

SEQ ID NO: 36305 - DNA, 21 bp, Artificial Sequence
  Description of Artificial Sequence: Synthetic oligonucleotide
ccaatggtcaaaggaacaagc

SEQ ID NO: 36306 - DNA, 21 bp, Artificial Sequence
  Description of Artificial Sequence: Synthetic oligonucleotide
ccaatggtcacagtcagaaca

SEQ ID NO: 36307 - DNA, 21 bp, Artificial Sequence
  Description of Artificial Sequence: Synthetic oligonucleotide
ccaaacgcaaaaacaatccca

SEQ ID NO: 36308 - DNA, 21 bp, Artificial Sequence
  Description of Artificial Sequence: Synthetic oligonucleotide
ccaaacgcacaaacagtctac

SEQ ID NO: 36309 - DNA, 21 bp, Artificial Sequence
  Description of Artificial Sequence: Synthetic oligonucleotide
ccaaacgcaagaatgctcgtc

SEQ ID NO: 36310 - DNA, 21 bp, Artificial Sequence
  Description of Artificial Sequence: Synthetic oligonucleotide
ccaaacgacggagcactccca

SEQ ID NO: 36311 - DNA, 21 bp, Artificial Sequence
  Description of Artificial Sequence: Synthetic oligonucleotide
ccaaacgacagagcagtcgtc

SEQ ID NO: 36312 - DNA, 21 bp, Artificial Sequence
  Description of Artificial Sequence: Synthetic oligonucleotide
ccaaacgacagaacaagaatc

SEQ ID NO: 36313 - DNA, 21 bp, Artificial Sequence
  Description of Artificial Sequence: Synthetic oligonucleotide
ccaaacgaacaagcactcgga

SEQ ID NO: 36314 - DNA, 21 bp, Artificial Sequence
  Description of Artificial Sequence: Synthetic oligonucleotide
ccaaacgaaagcctcgtcaca

SEQ ID NO: 36315 - DNA, 21 bp, Artificial Sequence
  Description of Artificial Sequence: Synthetic oligonucleotide
ccaaacttccacagagcagaa

SEQ ID NO: 36316 - DNA, 21 bp, Artificial Sequence
  Description of Artificial Sequence: Synthetic oligonucleotide
ccaaacggaccatacaacgca

SEQ ID NO: 36317 - DNA, 21 bp, Artificial Sequence
  Description of Artificial Sequence: Synthetic oligonucleotide
ccaaacggaagcgcaaaaagc

SEQ ID NO: 36318 - DNA, 21 bp, Artificial Sequence
  Description of Artificial Sequence: Synthetic oligonucleotide
ccaaaccacgacgtcccacca

SEQ ID NO: 36319 - DNA, 21 bp, Artificial Sequence
  Description of Artificial Sequence: Synthetic oligonucleotide
ccaaaccacaaaggattcgga

SEQ ID NO: 36320 - DNA, 21 bp, Artificial Sequence
  Description of Artificial Sequence: Synthetic oligonucleotide
ccaaaccacaacagcgacaaa

SEQ ID NO: 36321 - DNA, 21 bp, Artificial Sequence
  Description of Artificial Sequence: Synthetic oligonucleotide
ccaaaccacagccaactcctc

SEQ ID NO: 36322 - DNA, 21 bp, Artificial Sequence
  Description of Artificial Sequence: Synthetic oligonucleotide
ccaaacatcaaaaacccaagc

SEQ ID NO: 36323 - DNA, 21 bp, Artificial Sequence
  Description of Artificial Sequence: Synthetic oligonucleotide
ccaaacatcccaatgagagga

SEQ ID NO: 36324 - DNA, 21 bp, Artificial Sequence
  Description of Artificial Sequence: Synthetic oligonucleotide
ccaaacatcacaagcacactc

SEQ ID NO: 36325 - DNA, 21 bp, Artificial Sequence
  Description of Artificial Sequence: Synthetic oligonucleotide
ccaaacctcatcctcggacca

SEQ ID NO: 36326 - DNA, 21 bp, Artificial Sequence
  Description of Artificial Sequence: Synthetic oligonucleotide
ccaaacctccaaagaagccca

SEQ ID NO: 36327 - DNA, 21 bp, Artificial Sequence
  Description of Artificial Sequence: Synthetic oligonucleotide
ccaaacctcagcgacgaaagc

SEQ ID NO: 36328 - DNA, 21 bp, Artificial Sequence
  Description of Artificial Sequence: Synthetic oligonucleotide
ccaaacctcacaatggcaagc

SEQ ID NO: 36329 - DNA, 21 bp, Artificial Sequence
  Description of Artificial Sequence: Synthetic oligonucleotide
ccaaacctcgtcacagcagca

SEQ ID NO: 36330 - DNA, 21 bp, Artificial Sequence
  Description of Artificial Sequence: Synthetic oligonucleotide
ccaaacaacaacgtcccaagc

SEQ ID NO: 36331 - DNA, 21 bp, Artificial Sequence
  Description of Artificial Sequence: Synthetic oligonucleotide
ccaaacaacagagacagcaca

SEQ ID NO: 36332 - DNA, 21 bp, Artificial Sequence
  Description of Artificial Sequence: Synthetic oligonucleotide
ccaaacaacgtcatcagcgaa

SEQ ID NO: 36333 - DNA, 21 bp, Artificial Sequence
  Description of Artificial Sequence: Synthetic oligonucleotide
ccaaacaacgtcccactcgca

SEQ ID NO: 36334 - DNA, 21 bp, Artificial Sequence
  Description of Artificial Sequence: Synthetic oligonucleotide
ccaaacccagcagcagcagca

SEQ ID NO: 36335 - DNA, 21 bp, Artificial Sequence
  Description of Artificial Sequence: Synthetic oligonucleotide
ccaaacccagcaagactcaca

SEQ ID NO: 36336 - DNA, 21 bp, Artificial Sequence
  Description of Artificial Sequence: Synthetic oligonucleotide
ccaaacccaatcttcagcagc

SEQ ID NO: 36337 - DNA, 21 bp, Artificial Sequence
  Description of Artificial Sequence: Synthetic oligonucleotide
ccaaacccaacatggagcagc

SEQ ID NO: 36338 - DNA, 21 bp, Artificial Sequence
  Description of Artificial Sequence: Synthetic oligonucleotide
ccaaacccagtcacaagagga

SEQ ID NO: 36339 - DNA, 21 bp, Artificial Sequence
  Description of Artificial Sequence: Synthetic oligonucleotide
ccaaaccaagacacactcgac

SEQ ID NO: 36340 - DNA, 21 bp, Artificial Sequence
  Description of Artificial Sequence: Synthetic oligonucleotide
ccaaaccaaagcgtcaaacca

SEQ ID NO: 36341 - DNA, 21 bp, Artificial Sequence
  Description of Artificial Sequence: Synthetic oligonucleotide
ccaaacagaggacacccaagc

SEQ ID NO: 36342 - DNA, 21 bp, Artificial Sequence
  Description of Artificial Sequence: Synthetic oligonucleotide
ccaaacagaatcgcaccaatc

SEQ ID NO: 36343 - DNA, 21 bp, Artificial Sequence
  Description of Artificial Sequence: Synthetic oligonucleotide
ccaaacagcggagtcgtcaca

SEQ ID NO: 36344 - DNA, 21 bp, Artificial Sequence
  Description of Artificial Sequence: Synthetic oligonucleotide
ccaaacagcctcaacgcagca

SEQ ID NO: 36345 - DNA, 21 bp, Artificial Sequence
  Description of Artificial Sequence: Synthetic oligonucleotide
ccaaacagcagaacaccatac

SEQ ID NO: 36346 - DNA, 21 bp, Artificial Sequence
  Description of Artificial Sequence: Synthetic oligonucleotide
ccaaacagcagcccaagactc

SEQ ID NO: 36347 - DNA, 21 bp, Artificial Sequence
  Description of Artificial Sequence: Synthetic oligonucleotide
ccaaacagcacaagagtcgtc

SEQ ID NO: 36348 - DNA, 21 bp, Artificial Sequence
  Description of Artificial Sequence: Synthetic oligonucleotide
ccaaacacaatgacaagactc

SEQ ID NO: 36349 - DNA, 21 bp, Artificial Sequence
  Description of Artificial Sequence: Synthetic oligonucleotide
ccaaacgtccacccaaacatc

SEQ ID NO: 36350 - DNA, 21 bp, Artificial Sequence
  Description of Artificial Sequence: Synthetic oligonucleotide
ccaaacgtcaacgtcagcaca

SEQ ID NO: 36351 - DNA, 21 bp, Artificial Sequence
  Description of Artificial Sequence: Synthetic oligonucleotide
ccaaacgtcgtcgacatgagc

SEQ ID NO: 36352 - DNA, 21 bp, Artificial Sequence
  Description of Artificial Sequence: Synthetic oligonucleotide
ccaccagcagacctcagaaca

SEQ ID NO: 36353 - DNA, 21 bp, Artificial Sequence
  Description of Artificial Sequence: Synthetic oligonucleotide
ccaccagcactcagcccagtc

SEQ ID NO: 36354 - DNA, 21 bp, Artificial Sequence
  Description of Artificial Sequence: Synthetic oligonucleotide
ccaccagcaaacagcagcagc

SEQ ID NO: 36355 - DNA, 21 bp, Artificial Sequence
  Description of Artificial Sequence: Synthetic oligonucleotide
ccaccagacgcaagaagcagc

SEQ ID NO: 36356 - DNA, 21 bp, Artificial Sequence
  Description of Artificial Sequence: Synthetic oligonucleotide
ccaccagacggagcaagcaga

SEQ ID NO: 36357 - DNA, 21 bp, Artificial Sequence
  Description of Artificial Sequence: Synthetic oligonucleotide
ccaccagacaaaatgcacagc

SEQ ID NO: 36358 - DNA, 21 bp, Artificial Sequence
  Description of Artificial Sequence: Synthetic oligonucleotide
ccaccagacaacctccacaaa

SEQ ID NO: 36359 - DNA, 21 bp, Artificial Sequence
  Description of Artificial Sequence: Synthetic oligonucleotide
ccaccagaaatgatcctcgga

SEQ ID NO: 36360 - DNA, 21 bp, Artificial Sequence
  Description of Artificial Sequence: Synthetic oligonucleotide
ccaccattcaacaaaagcgac

SEQ ID NO: 36361 - DNA, 21 bp, Artificial Sequence
  Description of Artificial Sequence: Synthetic oligonucleotide
ccaccattcccagaaagactc

SEQ ID NO: 36362 - DNA, 21 bp, Artificial Sequence
  Description of Artificial Sequence: Synthetic oligonucleotide
ccaccaggacacgacgcaagc

SEQ ID NO: 36363 - DNA, 21 bp, Artificial Sequence
  Description of Artificial Sequence: Synthetic oligonucleotide
ccaccaggaatcacaacaagc

SEQ ID NO: 36364 - DNA, 21 bp, Artificial Sequence
  Description of Artificial Sequence: Synthetic oligonucleotide
ccaccaggacaaagcctcaca

SEQ ID NO: 36365 - DNA, 21 bp, Artificial Sequence
  Description of Artificial Sequence: Synthetic oligonucleotide
ccaccaggaagagtcgtcgca

SEQ ID NO: 36366 - DNA, 21 bp, Artificial Sequence
  Description of Artificial Sequence: Synthetic oligonucleotide
ccaccaggaagccacagcagc

SEQ ID NO: 36367 - DNA, 21 bp, Artificial Sequence
  Description of Artificial Sequence: Synthetic oligonucleotide
ccaccaggaagcagcagcaga

SEQ ID NO: 36368 - DNA, 21 bp, Artificial Sequence
  Description of Artificial Sequence: Synthetic oligonucleotide
ccaccaggatacagagcaagc

SEQ ID NO: 36369 - DNA, 21 bp, Artificial Sequence
  Description of Artificial Sequence: Synthetic oligonucleotide
ccaccacaccaacacctcctc

SEQ ID NO: 36370 - DNA, 21 bp, Artificial Sequence
  Description of Artificial Sequence: Synthetic oligonucleotide
ccaccacacagaacattccca

SEQ ID NO: 36371 - DNA, 21 bp, Artificial Sequence
  Description of Artificial Sequence: Synthetic oligonucleotide
ccaccacacacaacattcctc

SEQ ID NO: 36372 - DNA, 21 bp, Artificial Sequence
  Description of Artificial Sequence: Synthetic oligonucleotide
ccaccaatcgacaacagaaca

SEQ ID NO: 36373 - DNA, 21 bp, Artificial Sequence
  Description of Artificial Sequence: Synthetic oligonucleotide
ccaccaaaagcaatgccaaca

SEQ ID NO: 36374 - DNA, 21 bp, Artificial Sequence
  Description of Artificial Sequence: Synthetic oligonucleotide
ccaccactcgaagtcaaacaa

SEQ ID NO: 36375 - DNA, 21 bp, Artificial Sequence
  Description of Artificial Sequence: Synthetic oligonucleotide
ccaccactccacacaggagaa

SEQ ID NO: 36376 - DNA, 21 bp, Artificial Sequence
  Description of Artificial Sequence: Synthetic oligonucleotide
ccaccactcaaaagcccacca

SEQ ID NO: 36377 - DNA, 21 bp, Artificial Sequence
  Description of Artificial Sequence: Synthetic oligonucleotide
ccaccactcccaagcaacgca

SEQ ID NO: 36378 - DNA, 21 bp, Artificial Sequence
  Description of Artificial Sequence: Synthetic oligonucleotide
ccaccaatgcacggaacaaga

SEQ ID NO: 36379 - DNA, 21 bp, Artificial Sequence
  Description of Artificial Sequence: Synthetic oligonucleotide
ccaccaatgagcccacacgtc

SEQ ID NO: 36380 - DNA, 21 bp, Artificial Sequence
  Description of Artificial Sequence: Synthetic oligonucleotide
ccaccaatggtcacaaacaac

SEQ ID NO: 36381 - DNA, 21 bp, Artificial Sequence
  Description of Artificial Sequence: Synthetic oligonucleotide
ccaccaaacaaccacgcagga

SEQ ID NO: 36382 - DNA, 21 bp, Artificial Sequence
  Description of Artificial Sequence: Synthetic oligonucleotide
ccaccaaactacctcaacgca

SEQ ID NO: 36383 - DNA, 21 bp, Artificial Sequence
  Description of Artificial Sequence: Synthetic oligonucleotide
ccaccaccagcagcactcagc

SEQ ID NO: 36384 - DNA, 21 bp, Artificial Sequence
  Description of Artificial Sequence: Synthetic oligonucleotide
ccaccaccaaaaagccaaagc

SEQ ID NO: 36385 - DNA, 21 bp, Artificial Sequence
  Description of Artificial Sequence: Synthetic oligonucleotide
ccaccaccaaacaacaacctc

SEQ ID NO: 36386 - DNA, 21 bp, Artificial Sequence
  Description of Artificial Sequence: Synthetic oligonucleotide
ccaccaccaagagaagtccac

SEQ ID NO: 36387 - DNA, 21 bp, Artificial Sequence
  Description of Artificial Sequence: Synthetic oligonucleotide
ccaccaccaagctgcatggtc

SEQ ID NO: 36388 - DNA, 21 bp, Artificial Sequence
  Description of Artificial Sequence: Synthetic oligonucleotide
ccaccaccaagcagaatggga

SEQ ID NO: 36389 - DNA, 21 bp, Artificial Sequence
  Description of Artificial Sequence: Synthetic oligonucleotide
ccaccacaagaaatgagatac

SEQ ID NO: 36390 - DNA, 21 bp, Artificial Sequence
  Description of Artificial Sequence: Synthetic oligonucleotide
ccaccacaaagcgcagcagtc

SEQ ID NO: 36391 - DNA, 21 bp, Artificial Sequence
  Description of Artificial Sequence: Synthetic oligonucleotide
ccaccacaaagcaacagaaac

SEQ ID NO: 36392 - DNA, 21 bp, Artificial Sequence
  Description of Artificial Sequence: Synthetic oligonucleotide
ccaccaagaatcagcgacgca

SEQ ID NO: 36393 - DNA, 21 bp, Artificial Sequence
  Description of Artificial Sequence: Synthetic oligonucleotide
ccaccaagactcccaagctgc

SEQ ID NO: 36394 - DNA, 21 bp, Artificial Sequence
  Description of Artificial Sequence: Synthetic oligonucleotide
ccaccaagactcgtcagcaca

SEQ ID NO: 36395 - DNA, 21 bp, Artificial Sequence
  Description of Artificial Sequence: Synthetic oligonucleotide
ccaccaagaccaaacggaatc

SEQ ID NO: 36396 - DNA, 21 bp, Artificial Sequence
  Description of Artificial Sequence: Synthetic oligonucleotide
ccaccaagaagaccaatggaa

SEQ ID NO: 36397 - DNA, 21 bp, Artificial Sequence
  Description of Artificial Sequence: Synthetic oligonucleotide
ccaccaagaagcaacgtcgaa

SEQ ID NO: 36398 - DNA, 21 bp, Artificial Sequence
  Description of Artificial Sequence: Synthetic oligonucleotide
ccaccaagaacaccaagcagc

SEQ ID NO: 36399 - DNA, 21 bp, Artificial Sequence
  Description of Artificial Sequence: Synthetic oligonucleotide
ccaccaagagtcagcgcagtc

SEQ ID NO: 36400 - DNA, 21 bp, Artificial Sequence
  Description of Artificial Sequence: Synthetic oligonucleotide
ccaccaagcccaagcgtcaca

SEQ ID NO: 36401 - DNA, 21 bp, Artificial Sequence
  Description of Artificial Sequence: Synthetic oligonucleotide
ccaccaagcccaacatacatg

SEQ ID NO: 36402 - DNA, 21 bp, Artificial Sequence
  Description of Artificial Sequence: Synthetic oligonucleotide
ccaccaagcacagaaatcagc

SEQ ID NO: 36403 - DNA, 21 bp, Artificial Sequence
  Description of Artificial Sequence: Synthetic oligonucleotide
ccaccaagcacaaaactcgtc

SEQ ID NO: 36404 - DNA, 21 bp, Artificial Sequence
  Description of Artificial Sequence: Synthetic oligonucleotide
ccaccaagcacaaacccaaaa

SEQ ID NO: 36405 - DNA, 21 bp, Artificial Sequence
  Description of Artificial Sequence: Synthetic oligonucleotide
ccaccaagcgtcccaagagaa

SEQ ID NO: 36406 - DNA, 21 bp, Artificial Sequence
  Description of Artificial Sequence: Synthetic oligonucleotide
ccaccaacagaaccaagagca

SEQ ID NO: 36407 - DNA, 21 bp, Artificial Sequence
  Description of Artificial Sequence: Synthetic oligonucleotide
ccaccaacaggagcaagcttc

SEQ ID NO: 36408 - DNA, 21 bp, Artificial Sequence
  Description of Artificial Sequence: Synthetic oligonucleotide
ccaccaacaatcacaagcagc

SEQ ID NO: 36409 - DNA, 21 bp, Artificial Sequence
  Description of Artificial Sequence: Synthetic oligonucleotide
ccaccaacaaaagtcgacatg

SEQ ID NO: 36410 - DNA, 21 bp, Artificial Sequence
  Description of Artificial Sequence: Synthetic oligonucleotide
ccaccaacactccaaagcgac

SEQ ID NO: 36411 - DNA, 21 bp, Artificial Sequence
  Description of Artificial Sequence: Synthetic oligonucleotide
ccaccaacaaacccaacagtc

SEQ ID NO: 36412 - DNA, 21 bp, Artificial Sequence
  Description of Artificial Sequence: Synthetic oligonucleotide
ccaccaacaccagcagcacac

SEQ ID NO: 36413 - DNA, 21 bp, Artificial Sequence
  Description of Artificial Sequence: Synthetic oligonucleotide
ccaccaacaccagtcagctgg

SEQ ID NO: 36414 - DNA, 21 bp, Artificial Sequence
  Description of Artificial Sequence: Synthetic oligonucleotide
ccaccaacaagagaaagccca

SEQ ID NO: 36415 - DNA, 21 bp, Artificial Sequence
  Description of Artificial Sequence: Synthetic oligonucleotide
ccaccaacaacaaacctcaac

SEQ ID NO: 36416 - DNA, 21 bp, Artificial Sequence
  Description of Artificial Sequence: Synthetic oligonucleotide
ccaccagtcggaacagtcctc

SEQ ID NO: 36417 - DNA, 21 bp, Artificial Sequence
  Description of Artificial Sequence: Synthetic oligonucleotide
ccaccatacggagcagtcaca

SEQ ID NO: 36418 - DNA, 21 bp, Artificial Sequence
  Description of Artificial Sequence: Synthetic oligonucleotide
ccaccatacacagtcagccca

SEQ ID NO: 36419 - DNA, 21 bp, Artificial Sequence
  Description of Artificial Sequence: Synthetic oligonucleotide
ccacaagcaagacaaccattc

SEQ ID NO: 36420 - DNA, 21 bp, Artificial Sequence
  Description of Artificial Sequence: Synthetic oligonucleotide
ccacaagaaccaggattcgac

SEQ ID NO: 36421 - DNA, 21 bp, Artificial Sequence
  Description of Artificial Sequence: Synthetic oligonucleotide
ccacaagaaagagcaagaagc

SEQ ID NO: 36422 - DNA, 21 bp, Artificial Sequence
  Description of Artificial Sequence: Synthetic oligonucleotide
ccacaacacccaagcagaaac

SEQ ID NO: 36423 - DNA, 21 bp, Artificial Sequence
  Description of Artificial Sequence: Synthetic oligonucleotide
ccacaaatccacatcatggca

SEQ ID NO: 36424 - DNA, 21 bp, Artificial Sequence
  Description of Artificial Sequence: Synthetic oligonucleotide
ccacaaatcctcccaagcgca

SEQ ID NO: 36425 - DNA, 21 bp, Artificial Sequence
  Description of Artificial Sequence: Synthetic oligonucleotide
ccacaactcagccaaaacgtc

SEQ ID NO: 36426 - DNA, 21 bp, Artificial Sequence
  Description of Artificial Sequence: Synthetic oligonucleotide
ccacaaaacgcaagctacaga

SEQ ID NO: 36427 - DNA, 21 bp, Artificial Sequence
  Description of Artificial Sequence: Synthetic oligonucleotide
ccacaaaacaacccaccagga

SEQ ID NO: 36428 - DNA, 21 bp, Artificial Sequence
  Description of Artificial Sequence: Synthetic oligonucleotide
ccacaaaacagaccaccagtc

SEQ ID NO: 36429 - DNA, 21 bp, Artificial Sequence
  Description of Artificial Sequence: Synthetic oligonucleotide
ccacaaccaagaaacgtcatc

SEQ ID NO: 36430 - DNA, 21 bp, Artificial Sequence
  Description of Artificial Sequence: Synthetic oligonucleotide
ccacaaccaacagaaacacca

SEQ ID NO: 36431 - DNA, 21 bp, Artificial Sequence
  Description of Artificial Sequence: Synthetic oligonucleotide
ccacaaccaacatacacactc

SEQ ID NO: 36432 - DNA, 21 bp, Artificial Sequence
  Description of Artificial Sequence: Synthetic oligonucleotide
ccacaaagaaacgcaggagca

SEQ ID NO: 36433 - DNA, 21 bp, Artificial Sequence
  Description of Artificial Sequence: Synthetic oligonucleotide
ccacaaagacaaggactcctc

SEQ ID NO: 36434 - DNA, 21 bp, Artificial Sequence
  Description of Artificial Sequence: Synthetic oligonucleotide
ccacaaagaagcgcaatgcca

SEQ ID NO: 36435 - DNA, 21 bp, Artificial Sequence
  Description of Artificial Sequence: Synthetic oligonucleotide
ccacaaagaacacaacaagaa

SEQ ID NO: 36436 - DNA, 21 bp, Artificial Sequence
  Description of Artificial Sequence: Synthetic oligonucleotide
ccacaaagagtccacgcagca

SEQ ID NO: 36437 - DNA, 21 bp, Artificial Sequence
  Description of Artificial Sequence: Synthetic oligonucleotide
ccacaaagcctccacgtcaga

SEQ ID NO: 36438 - DNA, 21 bp, Artificial Sequence
  Description of Artificial Sequence: Synthetic oligonucleotide
ccacaaagcccaaaccacagc

SEQ ID NO: 36439 - DNA, 21 bp, Artificial Sequence
  Description of Artificial Sequence: Synthetic oligonucleotide
ccacaaagcagagacacatac

SEQ ID NO: 36440 - DNA, 21 bp, Artificial Sequence
  Description of Artificial Sequence: Synthetic oligonucleotide
ccacaaagcagaaacacaaac

SEQ ID NO: 36441 - DNA, 21 bp, Artificial Sequence
  Description of Artificial Sequence: Synthetic oligonucleotide
ccacaaacactcacaagcgtc

SEQ ID NO: 36442 - DNA, 21 bp, Artificial Sequence
  Description of Artificial Sequence: Synthetic oligonucleotide
ccacaaacaagaagcccaagc

SEQ ID NO: 36443 - DNA, 21 bp, Artificial Sequence
  Description of Artificial Sequence: Synthetic oligonucleotide
ccacaaacagtcacaaaagtc

SEQ ID NO: 36444 - DNA, 21 bp, Artificial Sequence
  Description of Artificial Sequence: Synthetic oligonucleotide
ccacaagtcagagcaagccaa

SEQ ID NO: 36445 - DNA, 21 bp, Artificial Sequence
  Description of Artificial Sequence: Synthetic oligonucleotide
ccacaagtcagacaaggacca

SEQ ID NO: 36446 - DNA, 21 bp, Artificial Sequence
  Description of Artificial Sequence: Synthetic oligonucleotide
ccacaagtcacaacaagcgca

SEQ ID NO: 36447 - DNA, 21 bp, Artificial Sequence
  Description of Artificial Sequence: Synthetic oligonucleotide
ccaagagcaaacagcggaatg

SEQ ID NO: 36448 - DNA, 21 bp, Artificial Sequence
  Description of Artificial Sequence: Synthetic oligonucleotide
ccaagagcaaacacattcagc

SEQ ID NO: 36449 - DNA, 21 bp, Artificial Sequence
  Description of Artificial Sequence: Synthetic oligonucleotide
ccaagagcaccagcagtcagc

SEQ ID NO: 36450 - DNA, 21 bp, Artificial Sequence
  Description of Artificial Sequence: Synthetic oligonucleotide
ccaagagcaagcggaccatac

SEQ ID NO: 36451 - DNA, 21 bp, Artificial Sequence
  Description of Artificial Sequence: Synthetic oligonucleotide
ccaagagcaacaacatacagc

SEQ ID NO: 36452 - DNA, 21 bp, Artificial Sequence
  Description of Artificial Sequence: Synthetic oligonucleotide
ccaagagacgcaacaagactc

SEQ ID NO: 36453 - DNA, 21 bp, Artificial Sequence
  Description of Artificial Sequence: Synthetic oligonucleotide
ccaagagacaaaaacccagca

SEQ ID NO: 36454 - DNA, 21 bp, Artificial Sequence
  Description of Artificial Sequence: Synthetic oligonucleotide
ccaagagacagactcgtcatc

SEQ ID NO: 36455 - DNA, 21 bp, Artificial Sequence
  Description of Artificial Sequence: Synthetic oligonucleotide
ccaagagactaccaaacaagc

SEQ ID NO: 36456 - DNA, 21 bp, Artificial Sequence
  Description of Artificial Sequence: Synthetic oligonucleotide
ccaagagaaaaagcagcaaca

SEQ ID NO: 36457 - DNA, 21 bp, Artificial Sequence
  Description of Artificial Sequence: Synthetic oligonucleotide
ccaagagaaccatacgcagaa

SEQ ID NO: 36458 - DNA, 21 bp, Artificial Sequence
  Description of Artificial Sequence: Synthetic oligonucleotide
ccaagaggagaaggaacaaac

SEQ ID NO: 36459 - DNA, 21 bp, Artificial Sequence
  Description of Artificial Sequence: Synthetic oligonucleotide
ccaagaggattcgaaacagca

SEQ ID NO: 36460 - DNA, 21 bp, Artificial Sequence
  Description of Artificial Sequence: Synthetic oligonucleotide
ccaagaggactcagcagcgca

SEQ ID NO: 36461 - DNA, 21 bp, Artificial Sequence
  Description of Artificial Sequence: Synthetic oligonucleotide
ccaagaggacaaatcgcaagc

SEQ ID NO: 36462 - DNA, 21 bp, Artificial Sequence
  Description of Artificial Sequence: Synthetic oligonucleotide
ccaagaggaagcggaagcagc

SEQ ID NO: 36463 - DNA, 21 bp, Artificial Sequence
  Description of Artificial Sequence: Synthetic oligonucleotide
ccaagaggaagcagcgactac

SEQ ID NO: 36464 - DNA, 21 bp, Artificial Sequence
  Description of Artificial Sequence: Synthetic oligonucleotide
ccaagacacacagtctacgca

SEQ ID NO: 36465 - DNA, 21 bp, Artificial Sequence
  Description of Artificial Sequence: Synthetic oligonucleotide
ccaagaatcgaagcaagaaac

SEQ ID NO: 36466 - DNA, 21 bp, Artificial Sequence
  Description of Artificial Sequence: Synthetic oligonucleotide
ccaagaatcatcaacacaatc

SEQ ID NO: 36467 - DNA, 21 bp, Artificial Sequence
  Description of Artificial Sequence: Synthetic oligonucleotide
ccaagaatcccacaaacacac

SEQ ID NO: 36468 - DNA, 21 bp, Artificial Sequence
  Description of Artificial Sequence: Synthetic oligonucleotide
ccaagaaaactcccaggagac

SEQ ID NO: 36469 - DNA, 21 bp, Artificial Sequence
  Description of Artificial Sequence: Synthetic oligonucleotide
ccaagaaaagtcggactcagc

SEQ ID NO: 36470 - DNA, 21 bp, Artificial Sequence
  Description of Artificial Sequence: Synthetic oligonucleotide
ccaagactcgcaggaggaatc

SEQ ID NO: 36471 - DNA, 21 bp, Artificial Sequence
  Description of Artificial Sequence: Synthetic oligonucleotide
ccaagactcggaggagtcgtc

SEQ ID NO: 36472 - DNA, 21 bp, Artificial Sequence
  Description of Artificial Sequence: Synthetic oligonucleotide
ccaagactcggactcgacaac

SEQ ID NO: 36473 - DNA, 21 bp, Artificial Sequence
  Description of Artificial Sequence: Synthetic oligonucleotide
ccaagactcaacgaaatgcca

SEQ ID NO: 36474 - DNA, 21 bp, Artificial Sequence
  Description of Artificial Sequence: Synthetic oligonucleotide
ccaagactcacagcaagcatc

SEQ ID NO: 36475 - DNA, 21 bp, Artificial Sequence
  Description of Artificial Sequence: Synthetic oligonucleotide
ccaagaatgagcgcaagcgtc

SEQ ID NO: 36476 - DNA, 21 bp, Artificial Sequence
  Description of Artificial Sequence: Synthetic oligonucleotide
ccaagaaacgcaagcacacca

SEQ ID NO: 36477 - DNA, 21 bp, Artificial Sequence
  Description of Artificial Sequence: Synthetic oligonucleotide
ccaagaaacccagaattcgga

SEQ ID NO: 36478 - DNA, 21 bp, Artificial Sequence
  Description of Artificial Sequence: Synthetic oligonucleotide
ccaagaaaccaatacgcagca

SEQ ID NO: 36479 - DNA, 21 bp, Artificial Sequence
  Description of Artificial Sequence: Synthetic oligonucleotide
ccaagaaacagactcagcgac

SEQ ID NO: 36480 - DNA, 21 bp, Artificial Sequence
  Description of Artificial Sequence: Synthetic oligonucleotide
ccaagaccagcaccagtccac

SEQ ID NO: 36481 - DNA, 21 bp, Artificial Sequence
  Description of Artificial Sequence: Synthetic oligonucleotide
ccaagaccagcagtcccagca

SEQ ID NO: 36482 - DNA, 21 bp, Artificial Sequence
  Description of Artificial Sequence: Synthetic oligonucleotide
ccaagaccaggaatggacaaa

SEQ ID NO: 36483 - DNA, 21 bp, Artificial Sequence
  Description of Artificial Sequence: Synthetic oligonucleotide
ccaagaccacaagcaaacagc

SEQ ID NO: 36484 - DNA, 21 bp, Artificial Sequence
  Description of Artificial Sequence: Synthetic oligonucleotide
ccaagaccacaaagcctcaca

SEQ ID NO: 36485 - DNA, 21 bp, Artificial Sequence
  Description of Artificial Sequence: Synthetic oligonucleotide
ccaagaccaagcctcgacctc

SEQ ID NO: 36486 - DNA, 21 bp, Artificial Sequence
  Description of Artificial Sequence: Synthetic oligonucleotide
ccaagaccaacacacgcagtc

SEQ ID NO: 36487 - DNA, 21 bp, Artificial Sequence
  Description of Artificial Sequence: Synthetic oligonucleotide
ccaagacaaacagaaggaatg

SEQ ID NO: 36488 - DNA, 21 bp, Artificial Sequence
  Description of Artificial Sequence: Synthetic oligonucleotide
ccaagacaaacaacaaacgga

SEQ ID NO: 36489 - DNA, 21 bp, Artificial Sequence
  Description of Artificial Sequence: Synthetic oligonucleotide
ccaagaagagaccaagaaaca

SEQ ID NO: 36490 - DNA, 21 bp, Artificial Sequence
  Description of Artificial Sequence: Synthetic oligonucleotide
ccaagaagaatcgaattccca

SEQ ID NO: 36491 - DNA, 21 bp, Artificial Sequence
  Description of Artificial Sequence: Synthetic oligonucleotide
ccaagaagcgcagacctcgaa

SEQ ID NO: 36492 - DNA, 21 bp, Artificial Sequence
  Description of Artificial Sequence: Synthetic oligonucleotide
ccaagaagcggaacagcaagc

SEQ ID NO: 36493 - DNA, 21 bp, Artificial Sequence
  Description of Artificial Sequence: Synthetic oligonucleotide
ccaagaagccacccaacaagc

SEQ ID NO: 36494 - DNA, 21 bp, Artificial Sequence
  Description of Artificial Sequence: Synthetic oligonucleotide
ccaagaagcatcccaggactc

SEQ ID NO: 36495 - DNA, 21 bp, Artificial Sequence
  Description of Artificial Sequence: Synthetic oligonucleotide
ccaagaagcctcccactcaca

SEQ ID NO: 36496 - DNA, 21 bp, Artificial Sequence
  Description of Artificial Sequence: Synthetic oligonucleotide
ccaagaagcatgaaccaaaca

SEQ ID NO: 36497 - DNA, 21 bp, Artificial Sequence
  Description of Artificial Sequence: Synthetic oligonucleotide
ccaagaagcaacagcgacaca

SEQ ID NO: 36498 - DNA, 21 bp, Artificial Sequence
  Description of Artificial Sequence: Synthetic oligonucleotide
ccaagaagcccaaacccacca

SEQ ID NO: 36499 - DNA, 21 bp, Artificial Sequence
  Description of Artificial Sequence: Synthetic oligonucleotide
ccaagaagcccaagcgacaaa

SEQ ID NO: 36500 - DNA, 21 bp, Artificial Sequence
  Description of Artificial Sequence: Synthetic oligonucleotide
ccaagaagcagcttcacagaa

SEQ ID NO: 36501 - DNA, 21 bp, Artificial Sequence
  Description of Artificial Sequence: Synthetic oligonucleotide
ccaagaagcagcagcagcctc

SEQ ID NO: 36502 - DNA, 21 bp, Artificial Sequence
  Description of Artificial Sequence: Synthetic oligonucleotide
ccaagaacagaaccattcctc

SEQ ID NO: 36503 - DNA, 21 bp, Artificial Sequence
  Description of Artificial Sequence: Synthetic oligonucleotide
ccaagaacacacacagacgca

SEQ ID NO: 36504 - DNA, 21 bp, Artificial Sequence
  Description of Artificial Sequence: Synthetic oligonucleotide
ccaagaacaagcggaacaatg

SEQ ID NO: 36505 - DNA, 21 bp, Artificial Sequence
  Description of Artificial Sequence: Synthetic oligonucleotide
ccaagaacaagcagcacacac

SEQ ID NO: 36506 - DNA, 21 bp, Artificial Sequence
  Description of Artificial Sequence: Synthetic oligonucleotide
ccaagaacaacaatgacagaa

SEQ ID NO: 36507 - DNA, 21 bp, Artificial Sequence
  Description of Artificial Sequence: Synthetic oligonucleotide
ccaagaacaacatacagcgac

SEQ ID NO: 36508 - DNA, 21 bp, Artificial Sequence
  Description of Artificial Sequence: Synthetic oligonucleotide
ccaagagtcggaagcccacaa

SEQ ID NO: 36509 - DNA, 21 bp, Artificial Sequence
  Description of Artificial Sequence: Synthetic oligonucleotide
ccaagagtcctcagcagcgga

SEQ ID NO: 36510 - DNA, 21 bp, Artificial Sequence
  Description of Artificial Sequence: Synthetic oligonucleotide
ccaagagtcccaacacacgac

SEQ ID NO: 36511 - DNA, 21 bp, Artificial Sequence
  Description of Artificial Sequence: Synthetic oligonucleotide
ccaagagtcagcatcgcaaac

SEQ ID NO: 36512 - DNA, 21 bp, Artificial Sequence
  Description of Artificial Sequence: Synthetic oligonucleotide
ccaagagtcagcgtcgcacca

SEQ ID NO: 36513 - DNA, 21 bp, Artificial Sequence
  Description of Artificial Sequence: Synthetic oligonucleotide
ccaagatacgacgcagcagga

SEQ ID NO: 36514 - DNA, 21 bp, Artificial Sequence
  Description of Artificial Sequence: Synthetic oligonucleotide
ccaagcgcagcacacccacca

SEQ ID NO: 36515 - DNA, 21 bp, Artificial Sequence
  Description of Artificial Sequence: Synthetic oligonucleotide
ccaagcgcaaacatgagaagc

SEQ ID NO: 36516 - DNA, 21 bp, Artificial Sequence
  Description of Artificial Sequence: Synthetic oligonucleotide
ccaagcgcaaacagactcagc

SEQ ID NO: 36517 - DNA, 21 bp, Artificial Sequence
  Description of Artificial Sequence: Synthetic oligonucleotide
ccaagcgcacaaagccacagc

SEQ ID NO: 36518 - DNA, 21 bp, Artificial Sequence
  Description of Artificial Sequence: Synthetic oligonucleotide
ccaagcgcaagcaacagcatg

SEQ ID NO: 36519 - DNA, 21 bp, Artificial Sequence
  Description of Artificial Sequence: Synthetic oligonucleotide
ccaagcgcaacaggagtcaaa

SEQ ID NO: 36520 - DNA, 21 bp, Artificial Sequence
  Description of Artificial Sequence: Synthetic oligonucleotide
ccaagctgcgacaacaacaca

SEQ ID NO: 36521 - DNA, 21 bp, Artificial Sequence
  Description of Artificial Sequence: Synthetic oligonucleotide
ccaagcgacgacgcaggagga

SEQ ID NO: 36522 - DNA, 21 bp, Artificial Sequence
  Description of Artificial Sequence: Synthetic oligonucleotide
ccaagcgacaaaaacacagga

SEQ ID NO: 36523 - DNA, 21 bp, Artificial Sequence
  Description of Artificial Sequence: Synthetic oligonucleotide
ccaagcgacaaaagcttcaga

SEQ ID NO: 36524 - DNA, 21 bp, Artificial Sequence
  Description of Artificial Sequence: Synthetic oligonucleotide
ccaagcgacatgccaagcagc

SEQ ID NO: 36525 - DNA, 21 bp, Artificial Sequence
  Description of Artificial Sequence: Synthetic oligonucleotide
ccaagcgacccaagcgcagga

SEQ ID NO: 36526 - DNA, 21 bp, Artificial Sequence
  Description of Artificial Sequence: Synthetic oligonucleotide
ccaagcgacccagtcacaaga

SEQ ID NO: 36527 - DNA, 21 bp, Artificial Sequence
  Description of Artificial Sequence: Synthetic oligonucleotide
ccaagcgacagagtccacaca

SEQ ID NO: 36528 - DNA, 21 bp, Artificial Sequence
  Description of Artificial Sequence: Synthetic oligonucleotide
ccaagcgacagcgcataccca

SEQ ID NO: 36529 - DNA, 21 bp, Artificial Sequence
  Description of Artificial Sequence: Synthetic oligonucleotide
ccaagcgacagcgtccacagc

SEQ ID NO: 36530 - DNA, 21 bp, Artificial Sequence
  Description of Artificial Sequence: Synthetic oligonucleotide
ccaagcgacacacacagaagc

SEQ ID NO: 36531 - DNA, 21 bp, Artificial Sequence
  Description of Artificial Sequence: Synthetic oligonucleotide
ccaagcgacacaccaacaaga

SEQ ID NO: 36532 - DNA, 21 bp, Artificial Sequence
  Description of Artificial Sequence: Synthetic oligonucleotide
ccaagcgaactcaacagcaga

SEQ ID NO: 36533 - DNA, 21 bp, Artificial Sequence
  Description of Artificial Sequence: Synthetic oligonucleotide
ccaagcgaacaaccagtcaga

SEQ ID NO: 36534 - DNA, 21 bp, Artificial Sequence
  Description of Artificial Sequence: Synthetic oligonucleotide
ccaagcgaaagcacaatcgtc

SEQ ID NO: 36535 - DNA, 21 bp, Artificial Sequence
  Description of Artificial Sequence: Synthetic oligonucleotide
ccaagcgaatacacactcgac

SEQ ID NO: 36536 - DNA, 21 bp, Artificial Sequence
  Description of Artificial Sequence: Synthetic oligonucleotide
ccaagcttcctcgaaggaatc

SEQ ID NO: 36537 - DNA, 21 bp, Artificial Sequence
  Description of Artificial Sequence: Synthetic oligonucleotide
ccaagcttcaacccaatgaca

SEQ ID NO: 36538 - DNA, 21 bp, Artificial Sequence
  Description of Artificial Sequence: Synthetic oligonucleotide
ccaagcttcccaagcatgaca

SEQ ID NO: 36539 - DNA, 21 bp, Artificial Sequence
  Description of Artificial Sequence: Synthetic oligonucleotide
ccaagcggaaaaagcccatac

SEQ ID NO: 36540 - DNA, 21 bp, Artificial Sequence
  Description of Artificial Sequence: Synthetic oligonucleotide
ccaagcggaatgaaaccaaca

SEQ ID NO: 36541 - DNA, 21 bp, Artificial Sequence
  Description of Artificial Sequence: Synthetic oligonucleotide
ccaagcggaatgccaagcagc

SEQ ID NO: 36542 - DNA, 21 bp, Artificial Sequence
  Description of Artificial Sequence: Synthetic oligonucleotide
ccaagcggacaagtcacagga

SEQ ID NO: 36543 - DNA, 21 bp, Artificial Sequence
  Description of Artificial Sequence: Synthetic oligonucleotide
ccaagcggaagcgacaacctc

SEQ ID NO: 36544 - DNA, 21 bp, Artificial Sequence
  Description of Artificial Sequence: Synthetic oligonucleotide
ccaagcggaacactcacaatg

SEQ ID NO: 36545 - DNA, 21 bp, Artificial Sequence
  Description of Artificial Sequence: Synthetic oligonucleotide
ccaagccacgacagcttcctc

SEQ ID NO: 36546 - DNA, 21 bp, Artificial Sequence
  Description of Artificial Sequence: Synthetic oligonucleotide
ccaagccacggactcgacaaa

SEQ ID NO: 36547 - DNA, 21 bp, Artificial Sequence
  Description of Artificial Sequence: Synthetic oligonucleotide
ccaagccacaaagcagtcttc

SEQ ID NO: 36548 - DNA, 21 bp, Artificial Sequence
  Description of Artificial Sequence: Synthetic oligonucleotide
ccaagccacccacacgaaaga

SEQ ID NO: 36549 - DNA, 21 bp, Artificial Sequence
  Description of Artificial Sequence: Synthetic oligonucleotide
ccaagccacagaacaagcctc

SEQ ID NO: 36550 - DNA, 21 bp, Artificial Sequence
  Description of Artificial Sequence: Synthetic oligonucleotide
ccaagccacagcggaacaaca

SEQ ID NO: 36551 - DNA, 21 bp, Artificial Sequence
  Description of Artificial Sequence: Synthetic oligonucleotide
ccaagccacacaagaccagtc

SEQ ID NO: 36552 - DNA, 21 bp, Artificial Sequence
  Description of Artificial Sequence: Synthetic oligonucleotide
ccaagcatcgcacaaccacca

SEQ ID NO: 36553 - DNA, 21 bp, Artificial Sequence
  Description of Artificial Sequence: Synthetic oligonucleotide
ccaagcatcaaactcagcgaa

SEQ ID NO: 36554 - DNA, 21 bp, Artificial Sequence
  Description of Artificial Sequence: Synthetic oligonucleotide
ccaagcatcagcaaaccaatg

SEQ ID NO: 36555 - DNA, 21 bp, Artificial Sequence
  Description of Artificial Sequence: Synthetic oligonucleotide
ccaagcaaagcaagcacagaa

SEQ ID NO: 36556 - DNA, 21 bp, Artificial Sequence
  Description of Artificial Sequence: Synthetic oligonucleotide
ccaagcaaaagcccaagcaca

SEQ ID NO: 36557 - DNA, 21 bp, Artificial Sequence
  Description of Artificial Sequence: Synthetic oligonucleotide
ccaagcaaaagcagcgcagca

SEQ ID NO: 36558 - DNA, 21 bp, Artificial Sequence
  Description of Artificial Sequence: Synthetic oligonucleotide
ccaagcaaagtcggaagagaa

SEQ ID NO: 36559 - DNA, 21 bp, Artificial Sequence
  Description of Artificial Sequence: Synthetic oligonucleotide
ccaagcctcgaaggagcacca

SEQ ID NO: 36560 - DNA, 21 bp, Artificial Sequence
  Description of Artificial Sequence: Synthetic oligonucleotide
ccaagcctcagagcagcactc

SEQ ID NO: 36561 - DNA, 21 bp, Artificial Sequence
  Description of Artificial Sequence: Synthetic oligonucleotide
ccaagcctcagcaacaaagtc

SEQ ID NO: 36562 - DNA, 21 bp, Artificial Sequence
  Description of Artificial Sequence: Synthetic oligonucleotide
ccaagcctcagcagcagccca

SEQ ID NO: 36563 - DNA, 21 bp, Artificial Sequence
  Description of Artificial Sequence: Synthetic oligonucleotide
ccaagcatgagcccacacaca

SEQ ID NO: 36564 - DNA, 21 bp, Artificial Sequence
  Description of Artificial Sequence: Synthetic oligonucleotide
ccaagcatgacagcacaagaa

SEQ ID NO: 36565 - DNA, 21 bp, Artificial Sequence
  Description of Artificial Sequence: Synthetic oligonucleotide
ccaagcaacgcaggaagattc

SEQ ID NO: 36566 - DNA, 21 bp, Artificial Sequence
  Description of Artificial Sequence: Synthetic oligonucleotide
ccaagcaacggaaaaagcatc

SEQ ID NO: 36567 - DNA, 21 bp, Artificial Sequence
  Description of Artificial Sequence: Synthetic oligonucleotide
ccaagcaaccacctcaaaagc

SEQ ID NO: 36568 - DNA, 21 bp, Artificial Sequence
  Description of Artificial Sequence: Synthetic oligonucleotide
ccaagcaacaacacagaagga

SEQ ID NO: 36569 - DNA, 21 bp, Artificial Sequence
  Description of Artificial Sequence: Synthetic oligonucleotide
ccaagcaacccaagcttcaga

SEQ ID NO: 36570 - DNA, 21 bp, Artificial Sequence
  Description of Artificial Sequence: Synthetic oligonucleotide
ccaagcaaccaactcgtcaga

SEQ ID NO: 36571 - DNA, 21 bp, Artificial Sequence
  Description of Artificial Sequence: Synthetic oligonucleotide
ccaagcccagcagtcaaaagc

SEQ ID NO: 36572 - DNA, 21 bp, Artificial Sequence
  Description of Artificial Sequence: Synthetic oligonucleotide
ccaagcccagacgtcagagga

SEQ ID NO: 36573 - DNA, 21 bp, Artificial Sequence
  Description of Artificial Sequence: Synthetic oligonucleotide
ccaagcccaaaaacatgccca

SEQ ID NO: 36574 - DNA, 21 bp, Artificial Sequence
  Description of Artificial Sequence: Synthetic oligonucleotide
ccaagcccactcagactcgga

SEQ ID NO: 36575 - DNA, 21 bp, Artificial Sequence
  Description of Artificial Sequence: Synthetic oligonucleotide
ccaagcccagtcaaaggagga

SEQ ID NO: 36576 - DNA, 21 bp, Artificial Sequence
  Description of Artificial Sequence: Synthetic oligonucleotide
ccaagccaagacccacacctc

SEQ ID NO: 36577 - DNA, 21 bp, Artificial Sequence
  Description of Artificial Sequence: Synthetic oligonucleotide
ccaagccaagacagacaagca

SEQ ID NO: 36578 - DNA, 21 bp, Artificial Sequence
  Description of Artificial Sequence: Synthetic oligonucleotide
ccaagccaattcaaagaaaac

SEQ ID NO: 36579 - DNA, 21 bp, Artificial Sequence
  Description of Artificial Sequence: Synthetic oligonucleotide
ccaagccaaggacacagcatg

SEQ ID NO: 36580 - DNA, 21 bp, Artificial Sequence
  Description of Artificial Sequence: Synthetic oligonucleotide
ccaagccaaggaccatggaca

SEQ ID NO: 36581 - DNA, 21 bp, Artificial Sequence
  Description of Artificial Sequence: Synthetic oligonucleotide
ccaagccaactcgcaagcaac

SEQ ID NO: 36582 - DNA, 21 bp, Artificial Sequence
  Description of Artificial Sequence: Synthetic oligonucleotide
ccaagccaactcgtcgtcgca

SEQ ID NO: 36583 - DNA, 21 bp, Artificial Sequence
  Description of Artificial Sequence: Synthetic oligonucleotide
ccaagccaaccaggagcaatc

SEQ ID NO: 36584 - DNA, 21 bp, Artificial Sequence
  Description of Artificial Sequence: Synthetic oligonucleotide
ccaagccaaagagaaatgaaa

SEQ ID NO: 36585 - DNA, 21 bp, Artificial Sequence
  Description of Artificial Sequence: Synthetic oligonucleotide
ccaagccaaagcaacctcaga

SEQ ID NO: 36586 - DNA, 21 bp, Artificial Sequence
  Description of Artificial Sequence: Synthetic oligonucleotide
ccaagccaaagcagcaaactc

SEQ ID NO: 36587 - DNA, 21 bp, Artificial Sequence
  Description of Artificial Sequence: Synthetic oligonucleotide
ccaagccaaacagcaacacca

SEQ ID NO: 36588 - DNA, 21 bp, Artificial Sequence
  Description of Artificial Sequence: Synthetic oligonucleotide
ccaagccaaacacacagccca

SEQ ID NO: 36589 - DNA, 21 bp, Artificial Sequence
  Description of Artificial Sequence: Synthetic oligonucleotide
ccaagcagagaaatcagcctc

SEQ ID NO: 36590 - DNA, 21 bp, Artificial Sequence
  Description of Artificial Sequence: Synthetic oligonucleotide
ccaagcagagaaagaagcaac

SEQ ID NO: 36591 - DNA, 21 bp, Artificial Sequence
  Description of Artificial Sequence: Synthetic oligonucleotide
ccaagcagattcagcacacca

SEQ ID NO: 36592 - DNA, 21 bp, Artificial Sequence
  Description of Artificial Sequence: Synthetic oligonucleotide
ccaagcagaggagacatcgga

SEQ ID NO: 36593 - DNA, 21 bp, Artificial Sequence
  Description of Artificial Sequence: Synthetic oligonucleotide
ccaagcagaggagtcctccca

SEQ ID NO: 36594 - DNA, 21 bp, Artificial Sequence
  Description of Artificial Sequence: Synthetic oligonucleotide
ccaagcagactcggaagcgca

SEQ ID NO: 36595 - DNA, 21 bp, Artificial Sequence
  Description of Artificial Sequence: Synthetic oligonucleotide
ccaagcagactcacaaacgac

SEQ ID NO: 36596 - DNA, 21 bp, Artificial Sequence
  Description of Artificial Sequence: Synthetic oligonucleotide
ccaagcagactcgtcagcgaa

SEQ ID NO: 36597 - DNA, 21 bp, Artificial Sequence
  Description of Artificial Sequence: Synthetic oligonucleotide
ccaagcagaccaatgatgagc

SEQ ID NO: 36598 - DNA, 21 bp, Artificial Sequence
  Description of Artificial Sequence: Synthetic oligonucleotide
ccaagcagaagcatgagcgaa

SEQ ID NO: 36599 - DNA, 21 bp, Artificial Sequence
  Description of Artificial Sequence: Synthetic oligonucleotide
ccaagcagaacagaaccacca

SEQ ID NO: 36600 - DNA, 21 bp, Artificial Sequence
  Description of Artificial Sequence: Synthetic oligonucleotide
ccaagcagaacacacctccac

SEQ ID NO: 36601 - DNA, 21 bp, Artificial Sequence
  Description of Artificial Sequence: Synthetic oligonucleotide
ccaagcagagtcgtcgaagca

SEQ ID NO: 36602 - DNA, 21 bp, Artificial Sequence
  Description of Artificial Sequence: Synthetic oligonucleotide
ccaagcagcgaaagcgacttc

SEQ ID NO: 36603 - DNA, 21 bp, Artificial Sequence
  Description of Artificial Sequence: Synthetic oligonucleotide
ccaagcagcggaggactcgtc

SEQ ID NO: 36604 - DNA, 21 bp, Artificial Sequence
  Description of Artificial Sequence: Synthetic oligonucleotide
ccaagcagcggactccacctc

SEQ ID NO: 36605 - DNA, 21 bp, Artificial Sequence
  Description of Artificial Sequence: Synthetic oligonucleotide
ccaagcagcaaaggactcctc

SEQ ID NO: 36606 - DNA, 21 bp, Artificial Sequence
  Description of Artificial Sequence: Synthetic oligonucleotide
ccaagcagcaaagtcggagac

SEQ ID NO: 36607 - DNA, 21 bp, Artificial Sequence
  Description of Artificial Sequence: Synthetic oligonucleotide
ccaagcagcctcgacgacgga

SEQ ID NO: 36608 - DNA, 21 bp, Artificial Sequence
  Description of Artificial Sequence: Synthetic oligonucleotide
ccaagcagcctcaacagactc

SEQ ID NO: 36609 - DNA, 21 bp, Artificial Sequence
  Description of Artificial Sequence: Synthetic oligonucleotide
ccaagcagcctcagcgcagga

SEQ ID NO: 36610 - DNA, 21 bp, Artificial Sequence
  Description of Artificial Sequence: Synthetic oligonucleotide
ccaagcagcatggcacaccca

SEQ ID NO: 36611 - DNA, 21 bp, Artificial Sequence
  Description of Artificial Sequence: Synthetic oligonucleotide
ccaagcagcatgatcgcagaa

SEQ ID NO: 36612 - DNA, 21 bp, Artificial Sequence
  Description of Artificial Sequence: Synthetic oligonucleotide
ccaagcagcccagcagtcaga

SEQ ID NO: 36613 - DNA, 21 bp, Artificial Sequence
  Description of Artificial Sequence: Synthetic oligonucleotide
ccaagcagcccactcatgaca

SEQ ID NO: 36614 - DNA, 21 bp, Artificial Sequence
  Description of Artificial Sequence: Synthetic oligonucleotide
ccaagcagcccaccattcttc

SEQ ID NO: 36615 - DNA, 21 bp, Artificial Sequence
  Description of Artificial Sequence: Synthetic oligonucleotide
ccaagcagcccagtcttcatc

SEQ ID NO: 36616 - DNA, 21 bp, Artificial Sequence
  Description of Artificial Sequence: Synthetic oligonucleotide
ccaagcagcagaggagcactc

SEQ ID NO: 36617 - DNA, 21 bp, Artificial Sequence
  Description of Artificial Sequence: Synthetic oligonucleotide
ccaagcagcagcatcaacaga

SEQ ID NO: 36618 - DNA, 21 bp, Artificial Sequence
  Description of Artificial Sequence: Synthetic oligonucleotide
ccaagcagcagcagcggaaac

SEQ ID NO: 36619 - DNA, 21 bp, Artificial Sequence
  Description of Artificial Sequence: Synthetic oligonucleotide
ccaagcagcagctacccactc

SEQ ID NO: 36620 - DNA, 21 bp, Artificial Sequence
  Description of Artificial Sequence: Synthetic oligonucleotide
ccaagcagcacaccaggacaa

SEQ ID NO: 36621 - DNA, 21 bp, Artificial Sequence
  Description of Artificial Sequence: Synthetic oligonucleotide
ccaagcacagcaggaagcaaa

SEQ ID NO: 36622 - DNA, 21 bp, Artificial Sequence
  Description of Artificial Sequence: Synthetic oligonucleotide
ccaagcacagcacacagcaca

SEQ ID NO: 36623 - DNA, 21 bp, Artificial Sequence
  Description of Artificial Sequence: Synthetic oligonucleotide
ccaagcacagcaatcaaaaca

SEQ ID NO: 36624 - DNA, 21 bp, Artificial Sequence
  Description of Artificial Sequence: Synthetic oligonucleotide
ccaagcacagcaagaacaagc

SEQ ID NO: 36625 - DNA, 21 bp, Artificial Sequence
  Description of Artificial Sequence: Synthetic oligonucleotide
ccaagcacaggaccattccac

SEQ ID NO: 36626 - DNA, 21 bp, Artificial Sequence
  Description of Artificial Sequence: Synthetic oligonucleotide
ccaagcacaggaagaccactc

SEQ ID NO: 36627 - DNA, 21 bp, Artificial Sequence
  Description of Artificial Sequence: Synthetic oligonucleotide
ccaagcacaaaagaattcatc

SEQ ID NO: 36628 - DNA, 21 bp, Artificial Sequence
  Description of Artificial Sequence: Synthetic oligonucleotide
ccaagcacaaacgcatacgca

SEQ ID NO: 36629 - DNA, 21 bp, Artificial Sequence
  Description of Artificial Sequence: Synthetic oligonucleotide
ccaagcacaaacggaagccac

SEQ ID NO: 36630 - DNA, 21 bp, Artificial Sequence
  Description of Artificial Sequence: Synthetic oligonucleotide
ccaagcacaccagcagcaaac

SEQ ID NO: 36631 - DNA, 21 bp, Artificial Sequence
  Description of Artificial Sequence: Synthetic oligonucleotide
ccaagcacaccagcagcaagc

SEQ ID NO: 36632 - DNA, 21 bp, Artificial Sequence
  Description of Artificial Sequence: Synthetic oligonucleotide
ccaagcacaagcctcagcgaa

SEQ ID NO: 36633 - DNA, 21 bp, Artificial Sequence
  Description of Artificial Sequence: Synthetic oligonucleotide
ccaagcgtcgacagctggagc

SEQ ID NO: 36634 - DNA, 21 bp, Artificial Sequence
  Description of Artificial Sequence: Synthetic oligonucleotide
ccaagcgtcgacagctacctc

SEQ ID NO: 36635 - DNA, 21 bp, Artificial Sequence
  Description of Artificial Sequence: Synthetic oligonucleotide
ccaagcgtcgaacacgtccca

SEQ ID NO: 36636 - DNA, 21 bp, Artificial Sequence
  Description of Artificial Sequence: Synthetic oligonucleotide
ccaagcgtcgaaagctggagc

SEQ ID NO: 36637 - DNA, 21 bp, Artificial Sequence
  Description of Artificial Sequence: Synthetic oligonucleotide
ccaagcgtcctccacccaagc

SEQ ID NO: 36638 - DNA, 21 bp, Artificial Sequence
  Description of Artificial Sequence: Synthetic oligonucleotide
ccaagcgtcccactcatgaca

SEQ ID NO: 36639 - DNA, 21 bp, Artificial Sequence
  Description of Artificial Sequence: Synthetic oligonucleotide
ccaagcgtcccaagaggacca

SEQ ID NO: 36640 - DNA, 21 bp, Artificial Sequence
  Description of Artificial Sequence: Synthetic oligonucleotide
ccaagcgtccaacacttccca

SEQ ID NO: 36641 - DNA, 21 bp, Artificial Sequence
  Description of Artificial Sequence: Synthetic oligonucleotide
ccaagcgtcagagacccagca

SEQ ID NO: 36642 - DNA, 21 bp, Artificial Sequence
  Description of Artificial Sequence: Synthetic oligonucleotide
ccaagcgtcacaggaacaatg

SEQ ID NO: 36643 - DNA, 21 bp, Artificial Sequence
  Description of Artificial Sequence: Synthetic oligonucleotide
ccaagctacgacaaactcaaa

SEQ ID NO: 36644 - DNA, 21 bp, Artificial Sequence
  Description of Artificial Sequence: Synthetic oligonucleotide
ccaagctacccaggactcgac

SEQ ID NO: 36645 - DNA, 21 bp, Artificial Sequence
  Description of Artificial Sequence: Synthetic oligonucleotide
ccaagctacagccacatggaa

SEQ ID NO: 36646 - DNA, 21 bp, Artificial Sequence
  Description of Artificial Sequence: Synthetic oligonucleotide
ccaagctacagcgtcacagaa

SEQ ID NO: 36647 - DNA, 21 bp, Artificial Sequence
  Description of Artificial Sequence: Synthetic oligonucleotide
ccaacagcagcaagaccacca

SEQ ID NO: 36648 - DNA, 21 bp, Artificial Sequence
  Description of Artificial Sequence: Synthetic oligonucleotide
ccaacagcactcgcaagcttc

SEQ ID NO: 36649 - DNA, 21 bp, Artificial Sequence
  Description of Artificial Sequence: Synthetic oligonucleotide
ccaacagcactcggaaaaagc

SEQ ID NO: 36650 - DNA, 21 bp, Artificial Sequence
  Description of Artificial Sequence: Synthetic oligonucleotide
ccaacagcaccaacaatccca

SEQ ID NO: 36651 - DNA, 21 bp, Artificial Sequence
  Description of Artificial Sequence: Synthetic oligonucleotide
ccaacagcaagcccaaacaca

SEQ ID NO: 36652 - DNA, 21 bp, Artificial Sequence
  Description of Artificial Sequence: Synthetic oligonucleotide
ccaacagacaacacaagccca

SEQ ID NO: 36653 - DNA, 21 bp, Artificial Sequence
  Description of Artificial Sequence: Synthetic oligonucleotide
ccaacagacccaagagcacca

SEQ ID NO: 36654 - DNA, 21 bp, Artificial Sequence
  Description of Artificial Sequence: Synthetic oligonucleotide
ccaacagacagacacagcatc

SEQ ID NO: 36655 - DNA, 21 bp, Artificial Sequence
  Description of Artificial Sequence: Synthetic oligonucleotide
ccaacagacagaagagaaatg

SEQ ID NO: 36656 - DNA, 21 bp, Artificial Sequence
  Description of Artificial Sequence: Synthetic oligonucleotide
ccaacagacacagtcccacca

SEQ ID NO: 36657 - DNA, 21 bp, Artificial Sequence
  Description of Artificial Sequence: Synthetic oligonucleotide
ccaacagacgtcaacagagga

SEQ ID NO: 36658 - DNA, 21 bp, Artificial Sequence
  Description of Artificial Sequence: Synthetic oligonucleotide
ccaacagactacgcaagagga

SEQ ID NO: 36659 - DNA, 21 bp, Artificial Sequence
  Description of Artificial Sequence: Synthetic oligonucleotide
ccaacagaagcagcaggagtc

SEQ ID NO: 36660 - DNA, 21 bp, Artificial Sequence
  Description of Artificial Sequence: Synthetic oligonucleotide
ccaacagaaacaaacggatac

SEQ ID NO: 36661 - DNA, 21 bp, Artificial Sequence
  Description of Artificial Sequence: Synthetic oligonucleotide
ccaacattcctcacaacaaac

SEQ ID NO: 36662 - DNA, 21 bp, Artificial Sequence
  Description of Artificial Sequence: Synthetic oligonucleotide
ccaacattcacaagaagcaca

SEQ ID NO: 36663 - DNA, 21 bp, Artificial Sequence
  Description of Artificial Sequence: Synthetic oligonucleotide
ccaacaggagcaacaagcagc

SEQ ID NO: 36664 - DNA, 21 bp, Artificial Sequence
  Description of Artificial Sequence: Synthetic oligonucleotide
ccaacaggaggagcacacaca

SEQ ID NO: 36665 - DNA, 21 bp, Artificial Sequence
  Description of Artificial Sequence: Synthetic oligonucleotide
ccaacaggaccaggaagccca

SEQ ID NO: 36666 - DNA, 21 bp, Artificial Sequence
  Description of Artificial Sequence: Synthetic oligonucleotide
ccaacaggaccacacgacctc

SEQ ID NO: 36667 - DNA, 21 bp, Artificial Sequence
  Description of Artificial Sequence: Synthetic oligonucleotide
ccaacaggacaaccaagacca

SEQ ID NO: 36668 - DNA, 21 bp, Artificial Sequence
  Description of Artificial Sequence: Synthetic oligonucleotide
ccaacaggaagagcactcgca

SEQ ID NO: 36669 - DNA, 21 bp, Artificial Sequence
  Description of Artificial Sequence: Synthetic oligonucleotide
ccaacaggaagcatccaaatc

SEQ ID NO: 36670 - DNA, 21 bp, Artificial Sequence
  Description of Artificial Sequence: Synthetic oligonucleotide
ccaacaggaacaccagaaatc

SEQ ID NO: 36671 - DNA, 21 bp, Artificial Sequence
  Description of Artificial Sequence: Synthetic oligonucleotide
ccaacaggaacaagcccactc

SEQ ID NO: 36672 - DNA, 21 bp, Artificial Sequence
  Description of Artificial Sequence: Synthetic oligonucleotide
ccaacaggagtcggaagcctc

SEQ ID NO: 36673 - DNA, 21 bp, Artificial Sequence
  Description of Artificial Sequence: Synthetic oligonucleotide
ccaacacacccaaacagcttc

SEQ ID NO: 36674 - DNA, 21 bp, Artificial Sequence
  Description of Artificial Sequence: Synthetic oligonucleotide
ccaacacacagcggaatcaca

SEQ ID NO: 36675 - DNA, 21 bp, Artificial Sequence
  Description of Artificial Sequence: Synthetic oligonucleotide
ccaacacacagcctcatcagc

SEQ ID NO: 36676 - DNA, 21 bp, Artificial Sequence
  Description of Artificial Sequence: Synthetic oligonucleotide
ccaacacacagcacaaacaaa

SEQ ID NO: 36677 - DNA, 21 bp, Artificial Sequence
  Description of Artificial Sequence: Synthetic oligonucleotide
ccaacaatcccaaaaaaagac

SEQ ID NO: 36678 - DNA, 21 bp, Artificial Sequence
  Description of Artificial Sequence: Synthetic oligonucleotide
ccaacaatcccactcgacaga

SEQ ID NO: 36679 - DNA, 21 bp, Artificial Sequence
  Description of Artificial Sequence: Synthetic oligonucleotide
ccaacaaaaccactcggagac

SEQ ID NO: 36680 - DNA, 21 bp, Artificial Sequence
  Description of Artificial Sequence: Synthetic oligonucleotide
ccaacactcgacgacccaaaa

SEQ ID NO: 36681 - DNA, 21 bp, Artificial Sequence
  Description of Artificial Sequence: Synthetic oligonucleotide
ccaacactcgacggaaaacca

SEQ ID NO: 36682 - DNA, 21 bp, Artificial Sequence
  Description of Artificial Sequence: Synthetic oligonucleotide
ccaacactcaaaagcgacatg

SEQ ID NO: 36683 - DNA, 21 bp, Artificial Sequence
  Description of Artificial Sequence: Synthetic oligonucleotide
ccaacactcccaagcacagtc

SEQ ID NO: 36684 - DNA, 21 bp, Artificial Sequence
  Description of Artificial Sequence: Synthetic oligonucleotide
ccaacactcagcatggcacac

SEQ ID NO: 36685 - DNA, 21 bp, Artificial Sequence
  Description of Artificial Sequence: Synthetic oligonucleotide
ccaacactcagcagaacacac

SEQ ID NO: 36686 - DNA, 21 bp, Artificial Sequence
  Description of Artificial Sequence: Synthetic oligonucleotide
ccaacactcagcacactcctc

SEQ ID NO: 36687 - DNA, 21 bp, Artificial Sequence
  Description of Artificial Sequence: Synthetic oligonucleotide
ccaacaatgcacatgctcagc

SEQ ID NO: 36688 - DNA, 21 bp, Artificial Sequence
  Description of Artificial Sequence: Synthetic oligonucleotide
ccaacaatgaacagaaacgaa

SEQ ID NO: 36689 - DNA, 21 bp, Artificial Sequence
  Description of Artificial Sequence: Synthetic oligonucleotide
ccaacaatgagcgacagcaga

SEQ ID NO: 36690 - DNA, 21 bp, Artificial Sequence
  Description of Artificial Sequence: Synthetic oligonucleotide
ccaacaaacgcactccacctc

SEQ ID NO: 36691 - DNA, 21 bp, Artificial Sequence
  Description of Artificial Sequence: Synthetic oligonucleotide
ccaacaaacgcagtcgacaac

SEQ ID NO: 36692 - DNA, 21 bp, Artificial Sequence
  Description of Artificial Sequence: Synthetic oligonucleotide
ccaacaaacctcggaagagca

SEQ ID NO: 36693 - DNA, 21 bp, Artificial Sequence
  Description of Artificial Sequence: Synthetic oligonucleotide
ccaacaaacccaagactcatg

SEQ ID NO: 36694 - DNA, 21 bp, Artificial Sequence
  Description of Artificial Sequence: Synthetic oligonucleotide
ccaacaaacagaccaagcagc

SEQ ID NO: 36695 - DNA, 21 bp, Artificial Sequence
  Description of Artificial Sequence: Synthetic oligonucleotide
ccaacaccagcagcacacgga

SEQ ID NO: 36696 - DNA, 21 bp, Artificial Sequence
  Description of Artificial Sequence: Synthetic oligonucleotide
ccaacaccaccaacagtcaca

SEQ ID NO: 36697 - DNA, 21 bp, Artificial Sequence
  Description of Artificial Sequence: Synthetic oligonucleotide
ccaacaccacaaggaagcgca

SEQ ID NO: 36698 - DNA, 21 bp, Artificial Sequence
  Description of Artificial Sequence: Synthetic oligonucleotide
ccaacaccaagaccaagccca

SEQ ID NO: 36699 - DNA, 21 bp, Artificial Sequence
  Description of Artificial Sequence: Synthetic oligonucleotide
ccaacaccaagaagcgtccca

SEQ ID NO: 36700 - DNA, 21 bp, Artificial Sequence
  Description of Artificial Sequence: Synthetic oligonucleotide
ccaacacaaagcggagtcagc

SEQ ID NO: 36701 - DNA, 21 bp, Artificial Sequence
  Description of Artificial Sequence: Synthetic oligonucleotide
ccaacaagagcagaattctac

SEQ ID NO: 36702 - DNA, 21 bp, Artificial Sequence
  Description of Artificial Sequence: Synthetic oligonucleotide
ccaacaagacaaccagtcctc

SEQ ID NO: 36703 - DNA, 21 bp, Artificial Sequence
  Description of Artificial Sequence: Synthetic oligonucleotide
ccaacaagaacaatcaacgca

SEQ ID NO: 36704 - DNA, 21 bp, Artificial Sequence
  Description of Artificial Sequence: Synthetic oligonucleotide
ccaacaagaacaccagcaagc

SEQ ID NO: 36705 - DNA, 21 bp, Artificial Sequence
  Description of Artificial Sequence: Synthetic oligonucleotide
ccaacaagcgacttcaaatgc

SEQ ID NO: 36706 - DNA, 21 bp, Artificial Sequence
  Description of Artificial Sequence: Synthetic oligonucleotide
ccaacaagcgaagcactcaga

SEQ ID NO: 36707 - DNA, 21 bp, Artificial Sequence
  Description of Artificial Sequence: Synthetic oligonucleotide
ccaacaagcatccacagaaac

SEQ ID NO: 36708 - DNA, 21 bp, Artificial Sequence
  Description of Artificial Sequence: Synthetic oligonucleotide
ccaacaagcatcgtcagaagc

SEQ ID NO: 36709 - DNA, 21 bp, Artificial Sequence
  Description of Artificial Sequence: Synthetic oligonucleotide
ccaacaagcaaaggaccactc

SEQ ID NO: 36710 - DNA, 21 bp, Artificial Sequence
  Description of Artificial Sequence: Synthetic oligonucleotide
ccaacaagcccaacagacatg

SEQ ID NO: 36711 - DNA, 21 bp, Artificial Sequence
  Description of Artificial Sequence: Synthetic oligonucleotide
ccaacaagcccaacaacatgc

SEQ ID NO: 36712 - DNA, 21 bp, Artificial Sequence
  Description of Artificial Sequence: Synthetic oligonucleotide
ccaacaagcagaccaagcctc

SEQ ID NO: 36713 - DNA, 21 bp, Artificial Sequence
  Description of Artificial Sequence: Synthetic oligonucleotide
ccaacaagcagcatcggagga

SEQ ID NO: 36714 - DNA, 21 bp, Artificial Sequence
  Description of Artificial Sequence: Synthetic oligonucleotide
ccaacaagcacaaacccactc

SEQ ID NO: 36715 - DNA, 21 bp, Artificial Sequence
  Description of Artificial Sequence: Synthetic oligonucleotide
ccaacaagcgtcggaacagga

SEQ ID NO: 36716 - DNA, 21 bp, Artificial Sequence
  Description of Artificial Sequence: Synthetic oligonucleotide
ccaacaagcgtcccaaaaaca

SEQ ID NO: 36717 - DNA, 21 bp, Artificial Sequence
  Description of Artificial Sequence: Synthetic oligonucleotide
ccaacaacacacctcagcgac

SEQ ID NO: 36718 - DNA, 21 bp, Artificial Sequence
  Description of Artificial Sequence: Synthetic oligonucleotide
ccaacaacacacagcgcaaga

SEQ ID NO: 36719 - DNA, 21 bp, Artificial Sequence
  Description of Artificial Sequence: Synthetic oligonucleotide
ccaacaacactcgcagtcgca

SEQ ID NO: 36720 - DNA, 21 bp, Artificial Sequence
  Description of Artificial Sequence: Synthetic oligonucleotide
ccaacaacaaacggaagcaca

SEQ ID NO: 36721 - DNA, 21 bp, Artificial Sequence
  Description of Artificial Sequence: Synthetic oligonucleotide
ccaacaacaccagtcgcaatc

SEQ ID NO: 36722 - DNA, 21 bp, Artificial Sequence
  Description of Artificial Sequence: Synthetic oligonucleotide
ccaacaacaagaggaccacca

SEQ ID NO: 36723 - DNA, 21 bp, Artificial Sequence
  Description of Artificial Sequence: Synthetic oligonucleotide
ccaacagtcaaactcctcgga

SEQ ID NO: 36724 - DNA, 21 bp, Artificial Sequence
  Description of Artificial Sequence: Synthetic oligonucleotide
ccaacagtcccagacctcaac

SEQ ID NO: 36725 - DNA, 21 bp, Artificial Sequence
  Description of Artificial Sequence: Synthetic oligonucleotide
ccaacagtcccaagaccagga

SEQ ID NO: 36726 - DNA, 21 bp, Artificial Sequence
  Description of Artificial Sequence: Synthetic oligonucleotide
ccaacagtcccagtcggactc

SEQ ID NO: 36727 - DNA, 21 bp, Artificial Sequence
  Description of Artificial Sequence: Synthetic oligonucleotide
ccaacagtcagaggacaatac

SEQ ID NO: 36728 - DNA, 21 bp, Artificial Sequence
  Description of Artificial Sequence: Synthetic oligonucleotide
ccaacatacccaaaagcaaca

SEQ ID NO: 36729 - DNA, 21 bp, Artificial Sequence
  Description of Artificial Sequence: Synthetic oligonucleotide
ccaacatacagagacacagca

SEQ ID NO: 36730 - DNA, 21 bp, Artificial Sequence
  Description of Artificial Sequence: Synthetic oligonucleotide
ccagtcgcaagaagcatgagc

SEQ ID NO: 36731 - DNA, 21 bp, Artificial Sequence
  Description of Artificial Sequence: Synthetic oligonucleotide
ccagtcgcaacatgcagagtc

SEQ ID NO: 36732 - DNA, 21 bp, Artificial Sequence
  Description of Artificial Sequence: Synthetic oligonucleotide
ccagtcgcaacaagctacgac

SEQ ID NO: 36733 - DNA, 21 bp, Artificial Sequence
  Description of Artificial Sequence: Synthetic oligonucleotide
ccagtcgacgcactcccaaga

SEQ ID NO: 36734 - DNA, 21 bp, Artificial Sequence
  Description of Artificial Sequence: Synthetic oligonucleotide
ccagtcgaccacgcaagaagc

SEQ ID NO: 36735 - DNA, 21 bp, Artificial Sequence
  Description of Artificial Sequence: Synthetic oligonucleotide
ccagtcgacctcggaagagga

SEQ ID NO: 36736 - DNA, 21 bp, Artificial Sequence
  Description of Artificial Sequence: Synthetic oligonucleotide
ccagtcgaagcaacagtcctc

SEQ ID NO: 36737 - DNA, 21 bp, Artificial Sequence
  Description of Artificial Sequence: Synthetic oligonucleotide
ccagtcgaaaaatacgacaaa

SEQ ID NO: 36738 - DNA, 21 bp, Artificial Sequence
  Description of Artificial Sequence: Synthetic oligonucleotide
ccagtcgaaccaggaatgagc

SEQ ID NO: 36739 - DNA, 21 bp, Artificial Sequence
  Description of Artificial Sequence: Synthetic oligonucleotide
ccagtcgaaagccacagactc

SEQ ID NO: 36740 - DNA, 21 bp, Artificial Sequence
  Description of Artificial Sequence: Synthetic oligonucleotide
ccagtcttccacgaagcaagc

SEQ ID NO: 36741 - DNA, 21 bp, Artificial Sequence
  Description of Artificial Sequence: Synthetic oligonucleotide
ccagtcttcccacaaagcagc

SEQ ID NO: 36742 - DNA, 21 bp, Artificial Sequence
  Description of Artificial Sequence: Synthetic oligonucleotide
ccagtcggattcacagaaaac

SEQ ID NO: 36743 - DNA, 21 bp, Artificial Sequence
  Description of Artificial Sequence: Synthetic oligonucleotide
ccagtcggaagcaacagcgca

SEQ ID NO: 36744 - DNA, 21 bp, Artificial Sequence
  Description of Artificial Sequence: Synthetic oligonucleotide
ccagtccacatccacacaagc

SEQ ID NO: 36745 - DNA, 21 bp, Artificial Sequence
  Description of Artificial Sequence: Synthetic oligonucleotide
ccagtccacagcggaagacca

SEQ ID NO: 36746 - DNA, 21 bp, Artificial Sequence
  Description of Artificial Sequence: Synthetic oligonucleotide
ccagtcatcagcacaatcgca

SEQ ID NO: 36747 - DNA, 21 bp, Artificial Sequence
  Description of Artificial Sequence: Synthetic oligonucleotide
ccagtcaaagaagtcggagac

SEQ ID NO: 36748 - DNA, 21 bp, Artificial Sequence
  Description of Artificial Sequence: Synthetic oligonucleotide
ccagtcaaaagcgcagcacca

SEQ ID NO: 36749 - DNA, 21 bp, Artificial Sequence
  Description of Artificial Sequence: Synthetic oligonucleotide
ccagtcctcccaagcgaccac

SEQ ID NO: 36750 - DNA, 21 bp, Artificial Sequence
  Description of Artificial Sequence: Synthetic oligonucleotide
ccagtcatgggaacaagcgtc

SEQ ID NO: 36751 - DNA, 21 bp, Artificial Sequence
  Description of Artificial Sequence: Synthetic oligonucleotide
ccagtcatgagcggagcaagc

SEQ ID NO: 36752 - DNA, 21 bp, Artificial Sequence
  Description of Artificial Sequence: Synthetic oligonucleotide
ccagtcaacagcgaaagaatg

SEQ ID NO: 36753 - DNA, 21 bp, Artificial Sequence
  Description of Artificial Sequence: Synthetic oligonucleotide
ccagtcccaggaaaactcgca

SEQ ID NO: 36754 - DNA, 21 bp, Artificial Sequence
  Description of Artificial Sequence: Synthetic oligonucleotide
ccagtcccaccaccactcaga

SEQ ID NO: 36755 - DNA, 21 bp, Artificial Sequence
  Description of Artificial Sequence: Synthetic oligonucleotide
ccagtcccaagaagcgtcaac

SEQ ID NO: 36756 - DNA, 21 bp, Artificial Sequence
  Description of Artificial Sequence: Synthetic oligonucleotide
ccagtccaaatgacagcaagc

SEQ ID NO: 36757 - DNA, 21 bp, Artificial Sequence
  Description of Artificial Sequence: Synthetic oligonucleotide
ccagtccaagtcagcctcgga

SEQ ID NO: 36758 - DNA, 21 bp, Artificial Sequence
  Description of Artificial Sequence: Synthetic oligonucleotide
ccagtcagagcaatcgaacac

SEQ ID NO: 36759 - DNA, 21 bp, Artificial Sequence
  Description of Artificial Sequence: Synthetic oligonucleotide
ccagtcagagcaatggacgga

SEQ ID NO: 36760 - DNA, 21 bp, Artificial Sequence
  Description of Artificial Sequence: Synthetic oligonucleotide
ccagtcagcggaaacttcaca

SEQ ID NO: 36761 - DNA, 21 bp, Artificial Sequence
  Description of Artificial Sequence: Synthetic oligonucleotide
ccagtcagcaaagacagacca

SEQ ID NO: 36762 - DNA, 21 bp, Artificial Sequence
  Description of Artificial Sequence: Synthetic oligonucleotide
ccagtcagcatggcagcaaga

SEQ ID NO: 36763 - DNA, 21 bp, Artificial Sequence
  Description of Artificial Sequence: Synthetic oligonucleotide
ccagtcagcatgccaagagaa

SEQ ID NO: 36764 - DNA, 21 bp, Artificial Sequence
  Description of Artificial Sequence: Synthetic oligonucleotide
ccagtcagcccagcaatccca

SEQ ID NO: 36765 - DNA, 21 bp, Artificial Sequence
  Description of Artificial Sequence: Synthetic oligonucleotide
ccagtcagcccagtcccagca

SEQ ID NO: 36766 - DNA, 21 bp, Artificial Sequence
  Description of Artificial Sequence: Synthetic oligonucleotide
ccagtcagccaacacagcaaa

SEQ ID NO: 36767 - DNA, 21 bp, Artificial Sequence
  Description of Artificial Sequence: Synthetic oligonucleotide
ccagtcagcagcccaacaatg

SEQ ID NO: 36768 - DNA, 21 bp, Artificial Sequence
  Description of Artificial Sequence: Synthetic oligonucleotide
ccagtcagcacaagcgcagac

SEQ ID NO: 36769 - DNA, 21 bp, Artificial Sequence
  Description of Artificial Sequence: Synthetic oligonucleotide
ccagtcacagcaggagaaaga

SEQ ID NO: 36770 - DNA, 21 bp, Artificial Sequence
  Description of Artificial Sequence: Synthetic oligonucleotide
ccagtcacaggaccaggacaa

SEQ ID NO: 36771 - DNA, 21 bp, Artificial Sequence
  Description of Artificial Sequence: Synthetic oligonucleotide
ccagtcacaaaaagcctcctc

SEQ ID NO: 36772 - DNA, 21 bp, Artificial Sequence
  Description of Artificial Sequence: Synthetic oligonucleotide
ccagtcacaaaaagcgtcctc

SEQ ID NO: 36773 - DNA, 21 bp, Artificial Sequence
  Description of Artificial Sequence: Synthetic oligonucleotide
ccagtcacaaacgacagacac

SEQ ID NO: 36774 - DNA, 21 bp, Artificial Sequence
  Description of Artificial Sequence: Synthetic oligonucleotide
ccagtcacaacaaacgcagga

SEQ ID NO: 36775 - DNA, 21 bp, Artificial Sequence
  Description of Artificial Sequence: Synthetic oligonucleotide
ccagtcgtcaacgtctggagc

SEQ ID NO: 36776 - DNA, 21 bp, Artificial Sequence
  Description of Artificial Sequence: Synthetic oligonucleotide
ccagtcgtcagcgacacactc

SEQ ID NO: 36777 - DNA, 21 bp, Artificial Sequence
  Description of Artificial Sequence: Synthetic oligonucleotide
ccagtcgtcacaacaacactc

SEQ ID NO: 36778 - DNA, 21 bp, Artificial Sequence
  Description of Artificial Sequence: Synthetic oligonucleotide
ccagtctacgtcggagaaatc

SEQ ID NO: 36779 - DNA, 21 bp, Artificial Sequence
  Description of Artificial Sequence: Synthetic oligonucleotide
ccatgggcaacaatgcaagga

SEQ ID NO: 36780 - DNA, 21 bp, Artificial Sequence
  Description of Artificial Sequence: Synthetic oligonucleotide
ccatggaaagacaacagagga

SEQ ID NO: 36781 - DNA, 21 bp, Artificial Sequence
  Description of Artificial Sequence: Synthetic oligonucleotide
ccatggagcgaagacggaatg

SEQ ID NO: 36782 - DNA, 21 bp, Artificial Sequence
  Description of Artificial Sequence: Synthetic oligonucleotide
ccatacgcaacagcactcaca

SEQ ID NO: 36783 - DNA, 21 bp, Artificial Sequence
  Description of Artificial Sequence: Synthetic oligonucleotide
ccatacgacagaccaagcgca

SEQ ID NO: 36784 - DNA, 21 bp, Artificial Sequence
  Description of Artificial Sequence: Synthetic oligonucleotide
ccatacgaagcaagagcactc

SEQ ID NO: 36785 - DNA, 21 bp, Artificial Sequence
  Description of Artificial Sequence: Synthetic oligonucleotide
ccatacgaaatggtcgcaatg

SEQ ID NO: 36786 - DNA, 21 bp, Artificial Sequence
  Description of Artificial Sequence: Synthetic oligonucleotide
ccatacggaacaagagaaaca

SEQ ID NO: 36787 - DNA, 21 bp, Artificial Sequence
  Description of Artificial Sequence: Synthetic oligonucleotide
ccataccacaaccacagcgca

SEQ ID NO: 36788 - DNA, 21 bp, Artificial Sequence
  Description of Artificial Sequence: Synthetic oligonucleotide
ccatacatcggaggaatgagc

SEQ ID NO: 36789 - DNA, 21 bp, Artificial Sequence
  Description of Artificial Sequence: Synthetic oligonucleotide
ccatacctcgacccactcaga

SEQ ID NO: 36790 - DNA, 21 bp, Artificial Sequence
  Description of Artificial Sequence: Synthetic oligonucleotide
ccatacctcagcaacagacca

SEQ ID NO: 36791 - DNA, 21 bp, Artificial Sequence
  Description of Artificial Sequence: Synthetic oligonucleotide
ccatacctctacccagaagaa

SEQ ID NO: 36792 - DNA, 21 bp, Artificial Sequence
  Description of Artificial Sequence: Synthetic oligonucleotide
ccatacccagacccaagcaaa

SEQ ID NO: 36793 - DNA, 21 bp, Artificial Sequence
  Description of Artificial Sequence: Synthetic oligonucleotide
ccatacccagaaacaagccac

SEQ ID NO: 36794 - DNA, 21 bp, Artificial Sequence
  Description of Artificial Sequence: Synthetic oligonucleotide
ccatacccaagcgacaaattc

SEQ ID NO: 36795 - DNA, 21 bp, Artificial Sequence
  Description of Artificial Sequence: Synthetic oligonucleotide
ccatacccaacaagcaacgaa

SEQ ID NO: 36796 - DNA, 21 bp, Artificial Sequence
  Description of Artificial Sequence: Synthetic oligonucleotide
ccataccaaagaaacagcgtc

SEQ ID NO: 36797 - DNA, 21 bp, Artificial Sequence
  Description of Artificial Sequence: Synthetic oligonucleotide
ccatacagagaacacacagtc

SEQ ID NO: 36798 - DNA, 21 bp, Artificial Sequence
  Description of Artificial Sequence: Synthetic oligonucleotide
ccatacagagaaagcagccca

SEQ ID NO: 36799 - DNA, 21 bp, Artificial Sequence
  Description of Artificial Sequence: Synthetic oligonucleotide
ccatacagaagcgaaccagca

SEQ ID NO: 36800 - DNA, 21 bp, Artificial Sequence
  Description of Artificial Sequence: Synthetic oligonucleotide
ccatacagcgcaggataccac

SEQ ID NO: 36801 - DNA, 21 bp, Artificial Sequence
  Description of Artificial Sequence: Synthetic oligonucleotide
ccatacagcggaatgacactc

SEQ ID NO: 36802 - DNA, 21 bp, Artificial Sequence
  Description of Artificial Sequence: Synthetic oligonucleotide
ccatacagcgtcgcagtcagc

SEQ ID NO: 36803 - DNA, 21 bp, Artificial Sequence
  Description of Artificial Sequence: Synthetic oligonucleotide
ccatacacaagcgcactcctc

SEQ ID NO: 36804 - DNA, 21 bp, Artificial Sequence
  Description of Artificial Sequence: Synthetic oligonucleotide
ccatacgtcacagacagagtc

SEQ ID NO: 36805 - DNA, 21 bp, Artificial Sequence
  Description of Artificial Sequence: Synthetic oligonucleotide
ccatacgtcacagaagtctac

SEQ ID NO: 36806 - DNA, 21 bp, Artificial Sequence
  Description of Artificial Sequence: Synthetic oligonucleotide
caagcagcaagcctcctcgca

SEQ ID NO: 36807 - DNA, 21 bp, Artificial Sequence
  Description of Artificial Sequence: Synthetic oligonucleotide
caagcagaactcccatacgga

SEQ ID NO: 36808 - DNA, 21 bp, Artificial Sequence
  Description of Artificial Sequence: Synthetic oligonucleotide
caagcattcgacgtcgaaatg

SEQ ID NO: 36809 - DNA, 21 bp, Artificial Sequence
  Description of Artificial Sequence: Synthetic oligonucleotide
caagcaggaatgcaaggagca

SEQ ID NO: 36810 - DNA, 21 bp, Artificial Sequence
  Description of Artificial Sequence: Synthetic oligonucleotide
caagcaggaaacctcagagac

SEQ ID NO: 36811 - DNA, 21 bp, Artificial Sequence
  Description of Artificial Sequence: Synthetic oligonucleotide
caagcaggaaacaacggagca

SEQ ID NO: 36812 - DNA, 21 bp, Artificial Sequence
  Description of Artificial Sequence: Synthetic oligonucleotide
caagcaggagtcacaaacagc

SEQ ID NO: 36813 - DNA, 21 bp, Artificial Sequence
  Description of Artificial Sequence: Synthetic oligonucleotide
caagcacacggaggagcactc

SEQ ID NO: 36814 - DNA, 21 bp, Artificial Sequence
  Description of Artificial Sequence: Synthetic oligonucleotide
caagcaatccaacaaagacaa

SEQ ID NO: 36815 - DNA, 21 bp, Artificial Sequence
  Description of Artificial Sequence: Synthetic oligonucleotide
caagcaatcagaaacgaacca

SEQ ID NO: 36816 - DNA, 21 bp, Artificial Sequence
  Description of Artificial Sequence: Synthetic oligonucleotide
caagcaaaagcatacgcaaca

SEQ ID NO: 36817 - DNA, 21 bp, Artificial Sequence
  Description of Artificial Sequence: Synthetic oligonucleotide
caagcaaaaagcccaagcctc

SEQ ID NO: 36818 - DNA, 21 bp, Artificial Sequence
  Description of Artificial Sequence: Synthetic oligonucleotide
caagcactcgcaccaacaaac

SEQ ID NO: 36819 - DNA, 21 bp, Artificial Sequence
  Description of Artificial Sequence: Synthetic oligonucleotide
caagcactcccaacaatgcac

SEQ ID NO: 36820 - DNA, 21 bp, Artificial Sequence
  Description of Artificial Sequence: Synthetic oligonucleotide
caagcaaacggaagcgtcgga

SEQ ID NO: 36821 - DNA, 21 bp, Artificial Sequence
  Description of Artificial Sequence: Synthetic oligonucleotide
caagcaaacgtcagccaacca

SEQ ID NO: 36822 - DNA, 21 bp, Artificial Sequence
  Description of Artificial Sequence: Synthetic oligonucleotide
caagcaccaggacacagagaa

SEQ ID NO: 36823 - DNA, 21 bp, Artificial Sequence
  Description of Artificial Sequence: Synthetic oligonucleotide
caagcaccaggaatcctcctc

SEQ ID NO: 36824 - DNA, 21 bp, Artificial Sequence
  Description of Artificial Sequence: Synthetic oligonucleotide
caagcaccaggactcctcgtc

SEQ ID NO: 36825 - DNA, 21 bp, Artificial Sequence
  Description of Artificial Sequence: Synthetic oligonucleotide
caagcaccactcgcaagcctc

SEQ ID NO: 36826 - DNA, 21 bp, Artificial Sequence
  Description of Artificial Sequence: Synthetic oligonucleotide
caagcaccaagaagcgacgtc

SEQ ID NO: 36827 - DNA, 21 bp, Artificial Sequence
  Description of Artificial Sequence: Synthetic oligonucleotide
caagcacaactccaaggaaga

SEQ ID NO: 36828 - DNA, 21 bp, Artificial Sequence
  Description of Artificial Sequence: Synthetic oligonucleotide
caagcacaaagagcactcagc

SEQ ID NO: 36829 - DNA, 21 bp, Artificial Sequence
  Description of Artificial Sequence: Synthetic oligonucleotide
caagcacaatacccagcaatg

SEQ ID NO: 36830 - DNA, 21 bp, Artificial Sequence
  Description of Artificial Sequence: Synthetic oligonucleotide
caagcaagagcagtcacaagc

SEQ ID NO: 36831 - DNA, 21 bp, Artificial Sequence
  Description of Artificial Sequence: Synthetic oligonucleotide
caagcaagagacccaagcctc

SEQ ID NO: 36832 - DNA, 21 bp, Artificial Sequence
  Description of Artificial Sequence: Synthetic oligonucleotide
caagcaagagaagtcagccca

SEQ ID NO: 36833 - DNA, 21 bp, Artificial Sequence
  Description of Artificial Sequence: Synthetic oligonucleotide
caagcaagaggaaacgtcagc

SEQ ID NO: 36834 - DNA, 21 bp, Artificial Sequence
  Description of Artificial Sequence: Synthetic oligonucleotide
caagcaagaaacacaagcctc

SEQ ID NO: 36835 - DNA, 21 bp, Artificial Sequence
  Description of Artificial Sequence: Synthetic oligonucleotide
caagcaagaccaggaatcctc

SEQ ID NO: 36836 - DNA, 21 bp, Artificial Sequence
  Description of Artificial Sequence: Synthetic oligonucleotide
caagcaagagtcttcgacagc

SEQ ID NO: 36837 - DNA, 21 bp, Artificial Sequence
  Description of Artificial Sequence: Synthetic oligonucleotide
caagcaagcgcaaacagagca

SEQ ID NO: 36838 - DNA, 21 bp, Artificial Sequence
  Description of Artificial Sequence: Synthetic oligonucleotide
caagcaagcatcatcagagca

SEQ ID NO: 36839 - DNA, 21 bp, Artificial Sequence
  Description of Artificial Sequence: Synthetic oligonucleotide
caagcaagcaaactcccaagc

SEQ ID NO: 36840 - DNA, 21 bp, Artificial Sequence
  Description of Artificial Sequence: Synthetic oligonucleotide
caagcaagcccagcatacgga

SEQ ID NO: 36841 - DNA, 21 bp, Artificial Sequence
  Description of Artificial Sequence: Synthetic oligonucleotide
caagcaagccaaagcctcagc

SEQ ID NO: 36842 - DNA, 21 bp, Artificial Sequence
  Description of Artificial Sequence: Synthetic oligonucleotide
caagcaacagcaaacagcctc

SEQ ID NO: 36843 - DNA, 21 bp, Artificial Sequence
  Description of Artificial Sequence: Synthetic oligonucleotide
caagcaacattcggagacgac

SEQ ID NO: 36844 - DNA, 21 bp, Artificial Sequence
  Description of Artificial Sequence: Synthetic oligonucleotide
caagcaacaaaccaaagcctc

SEQ ID NO: 36845 - DNA, 21 bp, Artificial Sequence
  Description of Artificial Sequence: Synthetic oligonucleotide
caagcaacaccactcacaaca

SEQ ID NO: 36846 - DNA, 21 bp, Artificial Sequence
  Description of Artificial Sequence: Synthetic oligonucleotide
caagcaacacaactcggacac

SEQ ID NO: 36847 - DNA, 21 bp, Artificial Sequence
  Description of Artificial Sequence: Synthetic oligonucleotide
caagcagtcagagacaaagac

SEQ ID NO: 36848 - DNA, 21 bp, Artificial Sequence
  Description of Artificial Sequence: Synthetic oligonucleotide
caagcagtcagaccagacagc

SEQ ID NO: 36849 - DNA, 21 bp, Artificial Sequence
  Description of Artificial Sequence: Synthetic oligonucleotide
caagcataccacaacagcctc

SEQ ID NO: 36850 - DNA, 21 bp, Artificial Sequence
  Description of Artificial Sequence: Synthetic oligonucleotide
caagcatacgtcaacagcctc

SEQ ID NO: 36851 - DNA, 21 bp, Artificial Sequence
  Description of Artificial Sequence: Synthetic oligonucleotide
caatgcagcgacagaagagca

SEQ ID NO: 36852 - DNA, 21 bp, Artificial Sequence
  Description of Artificial Sequence: Synthetic oligonucleotide
caagacgcagacccagcacac

SEQ ID NO: 36853 - DNA, 21 bp, Artificial Sequence
  Description of Artificial Sequence: Synthetic oligonucleotide
caagacgacttcagaagcaaa

SEQ ID NO: 36854 - DNA, 21 bp, Artificial Sequence
  Description of Artificial Sequence: Synthetic oligonucleotide
caagacgacgtccaaaaactc

SEQ ID NO: 36855 - DNA, 21 bp, Artificial Sequence
  Description of Artificial Sequence: Synthetic oligonucleotide
caagacttcgacgacgtccac

SEQ ID NO: 36856 - DNA, 21 bp, Artificial Sequence
  Description of Artificial Sequence: Synthetic oligonucleotide
caagacggaatcagaatcatg

SEQ ID NO: 36857 - DNA, 21 bp, Artificial Sequence
  Description of Artificial Sequence: Synthetic oligonucleotide
caagacatcagagcattcgca

SEQ ID NO: 36858 - DNA, 21 bp, Artificial Sequence
  Description of Artificial Sequence: Synthetic oligonucleotide
caagacagagcactccaacca

SEQ ID NO: 36859 - DNA, 21 bp, Artificial Sequence
  Description of Artificial Sequence: Synthetic oligonucleotide
caagacagactcgcagacaca

SEQ ID NO: 36860 - DNA, 21 bp, Artificial Sequence
  Description of Artificial Sequence: Synthetic oligonucleotide
caagacagaatgagcctcaga

SEQ ID NO: 36861 - DNA, 21 bp, Artificial Sequence
  Description of Artificial Sequence: Synthetic oligonucleotide
caagacagaagcacaaacttc

SEQ ID NO: 36862 - DNA, 21 bp, Artificial Sequence
  Description of Artificial Sequence: Synthetic oligonucleotide
caagacagctgcctcctccca

SEQ ID NO: 36863 - DNA, 21 bp, Artificial Sequence
  Description of Artificial Sequence: Synthetic oligonucleotide
caagacagctacctcggatac

SEQ ID NO: 36864 - DNA, 21 bp, Artificial Sequence
  Description of Artificial Sequence: Synthetic oligonucleotide
caagacacactcacaagattc

SEQ ID NO: 36865 - DNA, 21 bp, Artificial Sequence
  Description of Artificial Sequence: Synthetic oligonucleotide
caagacacaacaagcctcgac

SEQ ID NO: 36866 - DNA, 21 bp, Artificial Sequence
  Description of Artificial Sequence: Synthetic oligonucleotide
caagacacatacacacacaaa

SEQ ID NO: 36867 - DNA, 21 bp, Artificial Sequence
  Description of Artificial Sequence: Synthetic oligonucleotide
caagacgtcggactcacagtc

SEQ ID NO: 36868 - DNA, 21 bp, Artificial Sequence
  Description of Artificial Sequence: Synthetic oligonucleotide
caagacgtcccaagctgcgga

SEQ ID NO: 36869 - DNA, 21 bp, Artificial Sequence
  Description of Artificial Sequence: Synthetic oligonucleotide
caagactacaaaaaaccaagc

SEQ ID NO: 36870 - DNA, 21 bp, Artificial Sequence
  Description of Artificial Sequence: Synthetic oligonucleotide
caagactacagactcccagaa

SEQ ID NO: 36871 - DNA, 21 bp, Artificial Sequence
  Description of Artificial Sequence: Synthetic oligonucleotide
caagaagcagcaagagtcgaa

SEQ ID NO: 36872 - DNA, 21 bp, Artificial Sequence
  Description of Artificial Sequence: Synthetic oligonucleotide
caagaagacacatggagcgga

SEQ ID NO: 36873 - DNA, 21 bp, Artificial Sequence
  Description of Artificial Sequence: Synthetic oligonucleotide
caagaaggagcagtcatgaac

SEQ ID NO: 36874 - DNA, 21 bp, Artificial Sequence
  Description of Artificial Sequence: Synthetic oligonucleotide
caagaactcctcaaaggatac

SEQ ID NO: 36875 - DNA, 21 bp, Artificial Sequence
  Description of Artificial Sequence: Synthetic oligonucleotide
caagaactcgtcctcacaaga

SEQ ID NO: 36876 - DNA, 21 bp, Artificial Sequence
  Description of Artificial Sequence: Synthetic oligonucleotide
caagaaccagcagtcagcatc

SEQ ID NO: 36877 - DNA, 21 bp, Artificial Sequence
  Description of Artificial Sequence: Synthetic oligonucleotide
caagaaccaatgagcggagca

SEQ ID NO: 36878 - DNA, 21 bp, Artificial Sequence
  Description of Artificial Sequence: Synthetic oligonucleotide
caagaaccaagaggaatgcac

SEQ ID NO: 36879 - DNA, 21 bp, Artificial Sequence
  Description of Artificial Sequence: Synthetic oligonucleotide
caagaaagaagaatgggacca

SEQ ID NO: 36880 - DNA, 21 bp, Artificial Sequence
  Description of Artificial Sequence: Synthetic oligonucleotide
caagaaagcagccacggacca

SEQ ID NO: 36881 - DNA, 21 bp, Artificial Sequence
  Description of Artificial Sequence: Synthetic oligonucleotide
caagaaagcacaggagtctgg

SEQ ID NO: 36882 - DNA, 21 bp, Artificial Sequence
  Description of Artificial Sequence: Synthetic oligonucleotide
caagaagtcgcaaacaaccca

SEQ ID NO: 36883 - DNA, 21 bp, Artificial Sequence
  Description of Artificial Sequence: Synthetic oligonucleotide
caagaagtccacatcacagga

SEQ ID NO: 36884 - DNA, 21 bp, Artificial Sequence
  Description of Artificial Sequence: Synthetic oligonucleotide
caagaagtcccaggaagaatc

SEQ ID NO: 36885 - DNA, 21 bp, Artificial Sequence
  Description of Artificial Sequence: Synthetic oligonucleotide
caagaatggaacgcaacagca

SEQ ID NO: 36886 - DNA, 21 bp, Artificial Sequence
  Description of Artificial Sequence: Synthetic oligonucleotide
caagaatacgtcagcaaaagc

SEQ ID NO: 36887 - DNA, 21 bp, Artificial Sequence
  Description of Artificial Sequence: Synthetic oligonucleotide
caattcgacaaaatgatgcca

SEQ ID NO: 36888 - DNA, 21 bp, Artificial Sequence
  Description of Artificial Sequence: Synthetic oligonucleotide
caattcgacctcagcccagca

SEQ ID NO: 36889 - DNA, 21 bp, Artificial Sequence
  Description of Artificial Sequence: Synthetic oligonucleotide
caattcgaaaacgcatgcgtc

SEQ ID NO: 36890 - DNA, 21 bp, Artificial Sequence
  Description of Artificial Sequence: Synthetic oligonucleotide
caattcggaatgccaagagac

SEQ ID NO: 36891 - DNA, 21 bp, Artificial Sequence
  Description of Artificial Sequence: Synthetic oligonucleotide
caattcctcaaacacgaagaa

SEQ ID NO: 36892 - DNA, 21 bp, Artificial Sequence
  Description of Artificial Sequence: Synthetic oligonucleotide
caattcatgggaggagtcaac

SEQ ID NO: 36893 - DNA, 21 bp, Artificial Sequence
  Description of Artificial Sequence: Synthetic oligonucleotide
caattcaacgaaacactcaca

SEQ ID NO: 36894 - DNA, 21 bp, Artificial Sequence
  Description of Artificial Sequence: Synthetic oligonucleotide
caattcaacccaagcatcaga

SEQ ID NO: 36895 - DNA, 21 bp, Artificial Sequence
  Description of Artificial Sequence: Synthetic oligonucleotide
caattcaacagcccaatgcca

SEQ ID NO: 36896 - DNA, 21 bp, Artificial Sequence
  Description of Artificial Sequence: Synthetic oligonucleotide
caattcccaggaagcatgcca

SEQ ID NO: 36897 - DNA, 21 bp, Artificial Sequence
  Description of Artificial Sequence: Synthetic oligonucleotide
caattcccaccagcaaacagc

SEQ ID NO: 36898 - DNA, 21 bp, Artificial Sequence
  Description of Artificial Sequence: Synthetic oligonucleotide
caattccaaagcagccaagca

SEQ ID NO: 36899 - DNA, 21 bp, Artificial Sequence
  Description of Artificial Sequence: Synthetic oligonucleotide
caattcagagcagaaatcaca

SEQ ID NO: 36900 - DNA, 21 bp, Artificial Sequence
  Description of Artificial Sequence: Synthetic oligonucleotide
caattcagcctcaacgcagaa

SEQ ID NO: 36901 - DNA, 21 bp, Artificial Sequence
  Description of Artificial Sequence: Synthetic oligonucleotide
caattcagcccaacaagcaga

SEQ ID NO: 36902 - DNA, 21 bp, Artificial Sequence
  Description of Artificial Sequence: Synthetic oligonucleotide
caattcagcagcggaagccca

SEQ ID NO: 36903 - DNA, 21 bp, Artificial Sequence
  Description of Artificial Sequence: Synthetic oligonucleotide
caaggagcagacagcagactc

SEQ ID NO: 36904 - DNA, 21 bp, Artificial Sequence
  Description of Artificial Sequence: Synthetic oligonucleotide
caaggagaacacttcgcagtc

SEQ ID NO: 36905 - DNA, 21 bp, Artificial Sequence
  Description of Artificial Sequence: Synthetic oligonucleotide
caaggagaaaaaccagacgca

SEQ ID NO: 36906 - DNA, 21 bp, Artificial Sequence
  Description of Artificial Sequence: Synthetic oligonucleotide
caaggaggaagcggaccatac

SEQ ID NO: 36907 - DNA, 21 bp, Artificial Sequence
  Description of Artificial Sequence: Synthetic oligonucleotide
caaggacacgacgacgacatc

SEQ ID NO: 36908 - DNA, 21 bp, Artificial Sequence
  Description of Artificial Sequence: Synthetic oligonucleotide
caaggaatcgaacacagacca

SEQ ID NO: 36909 - DNA, 21 bp, Artificial Sequence
  Description of Artificial Sequence: Synthetic oligonucleotide
caaggaatcacatgcagccca

SEQ ID NO: 36910 - DNA, 21 bp, Artificial Sequence
  Description of Artificial Sequence: Synthetic oligonucleotide
caaggaaaacaactcacagca

SEQ ID NO: 36911 - DNA, 21 bp, Artificial Sequence
  Description of Artificial Sequence: Synthetic oligonucleotide
caaggaaaagtcgaccaaaga

SEQ ID NO: 36912 - DNA, 21 bp, Artificial Sequence
  Description of Artificial Sequence: Synthetic oligonucleotide
caaggactcgtcgcaaacttc

SEQ ID NO: 36913 - DNA, 21 bp, Artificial Sequence
  Description of Artificial Sequence: Synthetic oligonucleotide
caaggaatgagcttcggacca

SEQ ID NO: 36914 - DNA, 21 bp, Artificial Sequence
  Description of Artificial Sequence: Synthetic oligonucleotide
caaggaaacagaagcccacac

SEQ ID NO: 36915 - DNA, 21 bp, Artificial Sequence
  Description of Artificial Sequence: Synthetic oligonucleotide
caaggaccagcaaacgtcgtc

SEQ ID NO: 36916 - DNA, 21 bp, Artificial Sequence
  Description of Artificial Sequence: Synthetic oligonucleotide
caaggaccaccagtcacaaac

SEQ ID NO: 36917 - DNA, 21 bp, Artificial Sequence
  Description of Artificial Sequence: Synthetic oligonucleotide
caaggaccaagagcagcacca

SEQ ID NO: 36918 - DNA, 21 bp, Artificial Sequence
  Description of Artificial Sequence: Synthetic oligonucleotide
caaggaccaagcatgctcaca

SEQ ID NO: 36919 - DNA, 21 bp, Artificial Sequence
  Description of Artificial Sequence: Synthetic oligonucleotide
caaggacaacacccaatgaca

SEQ ID NO: 36920 - DNA, 21 bp, Artificial Sequence
  Description of Artificial Sequence: Synthetic oligonucleotide
caaggacaaccaatcgacaga

SEQ ID NO: 36921 - DNA, 21 bp, Artificial Sequence
  Description of Artificial Sequence: Synthetic oligonucleotide
caaggaagagaatgggtccaa

SEQ ID NO: 36922 - DNA, 21 bp, Artificial Sequence
  Description of Artificial Sequence: Synthetic oligonucleotide
caaggaagaagcctcccagca

SEQ ID NO: 36923 - DNA, 21 bp, Artificial Sequence
  Description of Artificial Sequence: Synthetic oligonucleotide
caaggaagaacaccacaagca

SEQ ID NO: 36924 - DNA, 21 bp, Artificial Sequence
  Description of Artificial Sequence: Synthetic oligonucleotide
caaggaagccacagcagcaca

SEQ ID NO: 36925 - DNA, 21 bp, Artificial Sequence
  Description of Artificial Sequence: Synthetic oligonucleotide
caaggaagcagaacaaaccca

SEQ ID NO: 36926 - DNA, 21 bp, Artificial Sequence
  Description of Artificial Sequence: Synthetic oligonucleotide
caaggaagcacagcagtcaca

SEQ ID NO: 36927 - DNA, 21 bp, Artificial Sequence
  Description of Artificial Sequence: Synthetic oligonucleotide
caaggaagcacatggagccca

SEQ ID NO: 36928 - DNA, 21 bp, Artificial Sequence
  Description of Artificial Sequence: Synthetic oligonucleotide
caaggaacactcaaaaacatc

SEQ ID NO: 36929 - DNA, 21 bp, Artificial Sequence
  Description of Artificial Sequence: Synthetic oligonucleotide
caaggagtcgcaggacacgca

SEQ ID NO: 36930 - DNA, 21 bp, Artificial Sequence
  Description of Artificial Sequence: Synthetic oligonucleotide
caaggagtcctcctcgtcaca

SEQ ID NO: 36931 - DNA, 21 bp, Artificial Sequence
  Description of Artificial Sequence: Synthetic oligonucleotide
caaggagtcagacaagcagtc

SEQ ID NO: 36932 - DNA, 21 bp, Artificial Sequence
  Description of Artificial Sequence: Synthetic oligonucleotide
caaggagtcagaacaacaagc

SEQ ID NO: 36933 - DNA, 21 bp, Artificial Sequence
  Description of Artificial Sequence: Synthetic oligonucleotide
caacacgaaagaatgccaagc

SEQ ID NO: 36934 - DNA, 21 bp, Artificial Sequence
  Description of Artificial Sequence: Synthetic oligonucleotide
caacacttcaaccaagcagaa

SEQ ID NO: 36935 - DNA, 21 bp, Artificial Sequence
  Description of Artificial Sequence: Synthetic oligonucleotide
caacacggagcaccaacatgg

SEQ ID NO: 36936 - DNA, 21 bp, Artificial Sequence
  Description of Artificial Sequence: Synthetic oligonucleotide
caacacctccacacactcaaa

SEQ ID NO: 36937 - DNA, 21 bp, Artificial Sequence
  Description of Artificial Sequence: Synthetic oligonucleotide
caacacctcaacagctacgtc

SEQ ID NO: 36938 - DNA, 21 bp, Artificial Sequence
  Description of Artificial Sequence: Synthetic oligonucleotide
caacacctcccaagaacaaca

SEQ ID NO: 36939 - DNA, 21 bp, Artificial Sequence
  Description of Artificial Sequence: Synthetic oligonucleotide
caacacctcgtccacgacgca

SEQ ID NO: 36940 - DNA, 21 bp, Artificial Sequence
  Description of Artificial Sequence: Synthetic oligonucleotide
caacacagcctcgcagtcaca

SEQ ID NO: 36941 - DNA, 21 bp, Artificial Sequence
  Description of Artificial Sequence: Synthetic oligonucleotide
caacacagcagcctcggaatc

SEQ ID NO: 36942 - DNA, 21 bp, Artificial Sequence
  Description of Artificial Sequence: Synthetic oligonucleotide
caacacagcagcatggcaaga

SEQ ID NO: 36943 - DNA, 21 bp, Artificial Sequence
  Description of Artificial Sequence: Synthetic oligonucleotide
caacacacagcagcagcactc

SEQ ID NO: 36944 - DNA, 21 bp, Artificial Sequence
  Description of Artificial Sequence: Synthetic oligonucleotide
caacacacactcacaatcagc

SEQ ID NO: 36945 - DNA, 21 bp, Artificial Sequence
  Description of Artificial Sequence: Synthetic oligonucleotide
caacacacaagagtcgtcttc

SEQ ID NO: 36946 - DNA, 21 bp, Artificial Sequence
  Description of Artificial Sequence: Synthetic oligonucleotide
caacacacaacaaaacaaagc

SEQ ID NO: 36947 - DNA, 21 bp, Artificial Sequence
  Description of Artificial Sequence: Synthetic oligonucleotide
caacacgtcagcagcacagga

SEQ ID NO: 36948 - DNA, 21 bp, Artificial Sequence
  Description of Artificial Sequence: Synthetic oligonucleotide
caaatcgcaagaagcagcatc

SEQ ID NO: 36949 - DNA, 21 bp, Artificial Sequence
  Description of Artificial Sequence: Synthetic oligonucleotide
caaatcgactacagagcacca

SEQ ID NO: 36950 - DNA, 21 bp, Artificial Sequence
  Description of Artificial Sequence: Synthetic oligonucleotide
caaatcgaaacactcgcacac

SEQ ID NO: 36951 - DNA, 21 bp, Artificial Sequence
  Description of Artificial Sequence: Synthetic oligonucleotide
caaatcttcggaagaacacca

SEQ ID NO: 36952 - DNA, 21 bp, Artificial Sequence
  Description of Artificial Sequence: Synthetic oligonucleotide
caaatcggattcggaacaagc

SEQ ID NO: 36953 - DNA, 21 bp, Artificial Sequence
  Description of Artificial Sequence: Synthetic oligonucleotide
caaatcggaacatacctcgca

SEQ ID NO: 36954 - DNA, 21 bp, Artificial Sequence
  Description of Artificial Sequence: Synthetic oligonucleotide
caaatccacgaaagcggagaa

SEQ ID NO: 36955 - DNA, 21 bp, Artificial Sequence
  Description of Artificial Sequence: Synthetic oligonucleotide
caaatcatggcagacacaaga

SEQ ID NO: 36956 - DNA, 21 bp, Artificial Sequence
  Description of Artificial Sequence: Synthetic oligonucleotide
caaatcaacttcccaatggac

SEQ ID NO: 36957 - DNA, 21 bp, Artificial Sequence
  Description of Artificial Sequence: Synthetic oligonucleotide
caaatcaacagcaacaaaaca

SEQ ID NO: 36958 - DNA, 21 bp, Artificial Sequence
  Description of Artificial Sequence: Synthetic oligonucleotide
caaatcaacagcacaacagga

SEQ ID NO: 36959 - DNA, 21 bp, Artificial Sequence
  Description of Artificial Sequence: Synthetic oligonucleotide
caaatcccaatcatcgaaagc

SEQ ID NO: 36960 - DNA, 21 bp, Artificial Sequence
  Description of Artificial Sequence: Synthetic oligonucleotide
caaatcccaaaagcaccagga

SEQ ID NO: 36961 - DNA, 21 bp, Artificial Sequence
  Description of Artificial Sequence: Synthetic oligonucleotide
caaatcccaaacagcttcagc

SEQ ID NO: 36962 - DNA, 21 bp, Artificial Sequence
  Description of Artificial Sequence: Synthetic oligonucleotide
caaatcccaacaacactcgca

SEQ ID NO: 36963 - DNA, 21 bp, Artificial Sequence
  Description of Artificial Sequence: Synthetic oligonucleotide
caaatcagaaacagcacagaa

SEQ ID NO: 36964 - DNA, 21 bp, Artificial Sequence
  Description of Artificial Sequence: Synthetic oligonucleotide
caaatcagccaaccaaaaatc

SEQ ID NO: 36965 - DNA, 21 bp, Artificial Sequence
  Description of Artificial Sequence: Synthetic oligonucleotide
caaatcagcacactcacattc

SEQ ID NO: 36966 - DNA, 21 bp, Artificial Sequence
  Description of Artificial Sequence: Synthetic oligonucleotide
caaatcgtcccacaaggacca

SEQ ID NO: 36967 - DNA, 21 bp, Artificial Sequence
  Description of Artificial Sequence: Synthetic oligonucleotide
caaatcgtcacaggactcagc

SEQ ID NO: 36968 - DNA, 21 bp, Artificial Sequence
  Description of Artificial Sequence: Synthetic oligonucleotide
caaatctacggaagcgaaagc

SEQ ID NO: 36969 - DNA, 21 bp, Artificial Sequence
  Description of Artificial Sequence: Synthetic oligonucleotide
caaaaagcagcaagcgcagac

SEQ ID NO: 36970 - DNA, 21 bp, Artificial Sequence
  Description of Artificial Sequence: Synthetic oligonucleotide
caaaaagcaatcgacagcctc

SEQ ID NO: 36971 - DNA, 21 bp, Artificial Sequence
  Description of Artificial Sequence: Synthetic oligonucleotide
caaaaagaactcatcgtcgac

SEQ ID NO: 36972 - DNA, 21 bp, Artificial Sequence
  Description of Artificial Sequence: Synthetic oligonucleotide
caaaaagaaccaggaccaagc

SEQ ID NO: 36973 - DNA, 21 bp, Artificial Sequence
  Description of Artificial Sequence: Synthetic oligonucleotide
caaaaattcgcagacaaagga

SEQ ID NO: 36974 - DNA, 21 bp, Artificial Sequence
  Description of Artificial Sequence: Synthetic oligonucleotide
caaaaacacgacatcagaagc

SEQ ID NO: 36975 - DNA, 21 bp, Artificial Sequence
  Description of Artificial Sequence: Synthetic oligonucleotide
caaaaacacaactgcccagtc

SEQ ID NO: 36976 - DNA, 21 bp, Artificial Sequence
  Description of Artificial Sequence: Synthetic oligonucleotide
caaaaaaaagacccaatccca

SEQ ID NO: 36977 - DNA, 21 bp, Artificial Sequence
  Description of Artificial Sequence: Synthetic oligonucleotide
caaaaaatgcaacactacgac

SEQ ID NO: 36978 - DNA, 21 bp, Artificial Sequence
  Description of Artificial Sequence: Synthetic oligonucleotide
caaaaaccagcaacaagagac

SEQ ID NO: 36979 - DNA, 21 bp, Artificial Sequence
  Description of Artificial Sequence: Synthetic oligonucleotide
caaaaaagcaacaacgcactc

SEQ ID NO: 36980 - DNA, 21 bp, Artificial Sequence
  Description of Artificial Sequence: Synthetic oligonucleotide
caaaaagtcatcgcagaagtc

SEQ ID NO: 36981 - DNA, 21 bp, Artificial Sequence
  Description of Artificial Sequence: Synthetic oligonucleotide
caaaaagtcatgcaaccagga

SEQ ID NO: 36982 - DNA, 21 bp, Artificial Sequence
  Description of Artificial Sequence: Synthetic oligonucleotide
caactcgcaaaccacgtcgga

SEQ ID NO: 36983 - DNA, 21 bp, Artificial Sequence
  Description of Artificial Sequence: Synthetic oligonucleotide
caactcgcaccaccaaaaaca

SEQ ID NO: 36984 - DNA, 21 bp, Artificial Sequence
  Description of Artificial Sequence: Synthetic oligonucleotide
caactcgcaagcaacgcattc

SEQ ID NO: 36985 - DNA, 21 bp, Artificial Sequence
  Description of Artificial Sequence: Synthetic oligonucleotide
caactcgcaagcgtcagaatc

SEQ ID NO: 36986 - DNA, 21 bp, Artificial Sequence
  Description of Artificial Sequence: Synthetic oligonucleotide
caactcgacttcgacctcgtc

SEQ ID NO: 36987 - DNA, 21 bp, Artificial Sequence
  Description of Artificial Sequence: Synthetic oligonucleotide
caactcgacagcctcagcgtc

SEQ ID NO: 36988 - DNA, 21 bp, Artificial Sequence
  Description of Artificial Sequence: Synthetic oligonucleotide
caactcggaccaagcgtccca

SEQ ID NO: 36989 - DNA, 21 bp, Artificial Sequence
  Description of Artificial Sequence: Synthetic oligonucleotide
caactcggaagcctcgacgga

SEQ ID NO: 36990 - DNA, 21 bp, Artificial Sequence
  Description of Artificial Sequence: Synthetic oligonucleotide
caactcggagtcagaagccaa

SEQ ID NO: 36991 - DNA, 21 bp, Artificial Sequence
  Description of Artificial Sequence: Synthetic oligonucleotide
caactccactacgcaaacgaa

SEQ ID NO: 36992 - DNA, 21 bp, Artificial Sequence
  Description of Artificial Sequence: Synthetic oligonucleotide
caactcatcaaaacaccagga

SEQ ID NO: 36993 - DNA, 21 bp, Artificial Sequence
  Description of Artificial Sequence: Synthetic oligonucleotide
caactcaaagcagtcgaattc

SEQ ID NO: 36994 - DNA, 21 bp, Artificial Sequence
  Description of Artificial Sequence: Synthetic oligonucleotide
caactcaaaccactctacttc

SEQ ID NO: 36995 - DNA, 21 bp, Artificial Sequence
  Description of Artificial Sequence: Synthetic oligonucleotide
caactcaaaacagaaatgctc

SEQ ID NO: 36996 - DNA, 21 bp, Artificial Sequence
  Description of Artificial Sequence: Synthetic oligonucleotide
caactcaaaacaagcctcagc

SEQ ID NO: 36997 - DNA, 21 bp, Artificial Sequence
  Description of Artificial Sequence: Synthetic oligonucleotide
caactcctcagaacaggagac

SEQ ID NO: 36998 - DNA, 21 bp, Artificial Sequence
  Description of Artificial Sequence: Synthetic oligonucleotide
caactcctcagagtcacagga

SEQ ID NO: 36999 - DNA, 21 bp, Artificial Sequence
  Description of Artificial Sequence: Synthetic oligonucleotide
caactcatgagactcggagtc

SEQ ID NO: 37000 - DNA, 21 bp, Artificial Sequence
  Description of Artificial Sequence: Synthetic oligonucleotide
caactcaacgacctcgcaaga

SEQ ID NO: 37001 - DNA, 21 bp, Artificial Sequence
  Description of Artificial Sequence: Synthetic oligonucleotide
caactcaacagaccaccaagc

SEQ ID NO: 37002 - DNA, 21 bp, Artificial Sequence
  Description of Artificial Sequence: Synthetic oligonucleotide
caactcccagcagacaacgca

SEQ ID NO: 37003 - DNA, 21 bp, Artificial Sequence
  Description of Artificial Sequence: Synthetic oligonucleotide
caactcccacacgacagcgca

SEQ ID NO: 37004 - DNA, 21 bp, Artificial Sequence
  Description of Artificial Sequence: Synthetic oligonucleotide
caactcccacacgtcaaagtc

SEQ ID NO: 37005 - DNA, 21 bp, Artificial Sequence
  Description of Artificial Sequence: Synthetic oligonucleotide
caactcccacacgtcagcatg

SEQ ID NO: 37006 - DNA, 21 bp, Artificial Sequence
  Description of Artificial Sequence: Synthetic oligonucleotide
caactcccactcacaccacac

SEQ ID NO: 37007 - DNA, 21 bp, Artificial Sequence
  Description of Artificial Sequence: Synthetic oligonucleotide
caactcccaagcacaagaagc

SEQ ID NO: 37008 - DNA, 21 bp, Artificial Sequence
  Description of Artificial Sequence: Synthetic oligonucleotide
caactcccaacaaaactcgac

SEQ ID NO: 37009 - DNA, 21 bp, Artificial Sequence
  Description of Artificial Sequence: Synthetic oligonucleotide
caactcccagtcaacagcagc

SEQ ID NO: 37010 - DNA, 21 bp, Artificial Sequence
  Description of Artificial Sequence: Synthetic oligonucleotide
caactccaaatcacaacagga

SEQ ID NO: 37011 - DNA, 21 bp, Artificial Sequence
  Description of Artificial Sequence: Synthetic oligonucleotide
caactccaactcaaaacagca

SEQ ID NO: 37012 - DNA, 21 bp, Artificial Sequence
  Description of Artificial Sequence: Synthetic oligonucleotide
caactccaaacagacaaaaca

SEQ ID NO: 37013 - DNA, 21 bp, Artificial Sequence
  Description of Artificial Sequence: Synthetic oligonucleotide
caactcagaggaagctaccca

SEQ ID NO: 37014 - DNA, 21 bp, Artificial Sequence
  Description of Artificial Sequence: Synthetic oligonucleotide
caactcagacacacagacttc

SEQ ID NO: 37015 - DNA, 21 bp, Artificial Sequence
  Description of Artificial Sequence: Synthetic oligonucleotide
caactcagaccagcaaacagc

SEQ ID NO: 37016 - DNA, 21 bp, Artificial Sequence
  Description of Artificial Sequence: Synthetic oligonucleotide
caactcagaccagaaggactc

SEQ ID NO: 37017 - DNA, 21 bp, Artificial Sequence
  Description of Artificial Sequence: Synthetic oligonucleotide
caactcagcgcaccagcagca

SEQ ID NO: 37018 - DNA, 21 bp, Artificial Sequence
  Description of Artificial Sequence: Synthetic oligonucleotide
caactcagcgcaagcacaaga

SEQ ID NO: 37019 - DNA, 21 bp, Artificial Sequence
  Description of Artificial Sequence: Synthetic oligonucleotide
caactcagcaaagacgtcagc

SEQ ID NO: 37020 - DNA, 21 bp, Artificial Sequence
  Description of Artificial Sequence: Synthetic oligonucleotide
caactcagcctcgaaccattc

SEQ ID NO: 37021 - DNA, 21 bp, Artificial Sequence
  Description of Artificial Sequence: Synthetic oligonucleotide
caactcagcagagaagaacca

SEQ ID NO: 37022 - DNA, 21 bp, Artificial Sequence
  Description of Artificial Sequence: Synthetic oligonucleotide
caactcagcagaccagtccca

SEQ ID NO: 37023 - DNA, 21 bp, Artificial Sequence
  Description of Artificial Sequence: Synthetic oligonucleotide
caactcagcagcgcaccaaca

SEQ ID NO: 37024 - DNA, 21 bp, Artificial Sequence
  Description of Artificial Sequence: Synthetic oligonucleotide
caactcagcacaacacaagga

SEQ ID NO: 37025 - DNA, 21 bp, Artificial Sequence
  Description of Artificial Sequence: Synthetic oligonucleotide
caactcacagcaggagtccca

SEQ ID NO: 37026 - DNA, 21 bp, Artificial Sequence
  Description of Artificial Sequence: Synthetic oligonucleotide
caactcacaccagtccaccac

SEQ ID NO: 37027 - DNA, 21 bp, Artificial Sequence
  Description of Artificial Sequence: Synthetic oligonucleotide
caactcacaagaggaaactac

SEQ ID NO: 37028 - DNA, 21 bp, Artificial Sequence
  Description of Artificial Sequence: Synthetic oligonucleotide
caactcacagtccacacactc

SEQ ID NO: 37029 - DNA, 21 bp, Artificial Sequence
  Description of Artificial Sequence: Synthetic oligonucleotide
caactcgtccaacaacacctc

SEQ ID NO: 37030 - DNA, 21 bp, Artificial Sequence
  Description of Artificial Sequence: Synthetic oligonucleotide
caaatggcagaaacaagcaga

SEQ ID NO: 37031 - DNA, 21 bp, Artificial Sequence
  Description of Artificial Sequence: Synthetic oligonucleotide
caaatggcaagaacaatgagc

SEQ ID NO: 37032 - DNA, 21 bp, Artificial Sequence
  Description of Artificial Sequence: Synthetic oligonucleotide
caaatggcaagcatcccaagc

SEQ ID NO: 37033 - DNA, 21 bp, Artificial Sequence
  Description of Artificial Sequence: Synthetic oligonucleotide
caaatggacgacgcaccaagc

SEQ ID NO: 37034 - DNA, 21 bp, Artificial Sequence
  Description of Artificial Sequence: Synthetic oligonucleotide
caaatggacaacagaaaccca

SEQ ID NO: 37035 - DNA, 21 bp, Artificial Sequence
  Description of Artificial Sequence: Synthetic oligonucleotide
caaatggacagaagcagagtc

SEQ ID NO: 37036 - DNA, 21 bp, Artificial Sequence
  Description of Artificial Sequence: Synthetic oligonucleotide
caaatggaagcagcactctac

SEQ ID NO: 37037 - DNA, 21 bp, Artificial Sequence
  Description of Artificial Sequence: Synthetic oligonucleotide
caaatgcacagcagcctccac

SEQ ID NO: 37038 - DNA, 21 bp, Artificial Sequence
  Description of Artificial Sequence: Synthetic oligonucleotide
caaatgaaaaaccaagcaaca

SEQ ID NO: 37039 - DNA, 21 bp, Artificial Sequence
  Description of Artificial Sequence: Synthetic oligonucleotide
caaatgctcgacaaaaaccac

SEQ ID NO: 37040 - DNA, 21 bp, Artificial Sequence
  Description of Artificial Sequence: Synthetic oligonucleotide
caaatgaacgcactcccaatg

SEQ ID NO: 37041 - DNA, 21 bp, Artificial Sequence
  Description of Artificial Sequence: Synthetic oligonucleotide
caaatgaacatgccaaacgac

SEQ ID NO: 37042 - DNA, 21 bp, Artificial Sequence
  Description of Artificial Sequence: Synthetic oligonucleotide
caaatgccagcaacagcaaaa

SEQ ID NO: 37043 - DNA, 21 bp, Artificial Sequence
  Description of Artificial Sequence: Synthetic oligonucleotide
caaatgccagaaggaacaagc

SEQ ID NO: 37044 - DNA, 21 bp, Artificial Sequence
  Description of Artificial Sequence: Synthetic oligonucleotide
caaatgccaccaaacagcaac

SEQ ID NO: 37045 - DNA, 21 bp, Artificial Sequence
  Description of Artificial Sequence: Synthetic oligonucleotide
caaatgccaagcttcggagaa

SEQ ID NO: 37046 - DNA, 21 bp, Artificial Sequence
  Description of Artificial Sequence: Synthetic oligonucleotide
caaatgccaagcatgagcgga

SEQ ID NO: 37047 - DNA, 21 bp, Artificial Sequence
  Description of Artificial Sequence: Synthetic oligonucleotide
caaatgccaagcagcagaagc

SEQ ID NO: 37048 - DNA, 21 bp, Artificial Sequence
  Description of Artificial Sequence: Synthetic oligonucleotide
caaatgccaacaagaacaaca

SEQ ID NO: 37049 - DNA, 21 bp, Artificial Sequence
  Description of Artificial Sequence: Synthetic oligonucleotide
caaatgcaaagaccactcatc

SEQ ID NO: 37050 - DNA, 21 bp, Artificial Sequence
  Description of Artificial Sequence: Synthetic oligonucleotide
caaatgagcatcgtcgtccca

SEQ ID NO: 37051 - DNA, 21 bp, Artificial Sequence
  Description of Artificial Sequence: Synthetic oligonucleotide
caaatgacaatcctcaaacaa

SEQ ID NO: 37052 - DNA, 21 bp, Artificial Sequence
  Description of Artificial Sequence: Synthetic oligonucleotide
caaaacgaagcactcgtcgga

SEQ ID NO: 37053 - DNA, 21 bp, Artificial Sequence
  Description of Artificial Sequence: Synthetic oligonucleotide
caaaacgaactcttcagagca

SEQ ID NO: 37054 - DNA, 21 bp, Artificial Sequence
  Description of Artificial Sequence: Synthetic oligonucleotide
caaaacggactcccacaaaca

SEQ ID NO: 37055 - DNA, 21 bp, Artificial Sequence
  Description of Artificial Sequence: Synthetic oligonucleotide
caaaaccacccagtcacaaaa

SEQ ID NO: 37056 - DNA, 21 bp, Artificial Sequence
  Description of Artificial Sequence: Synthetic oligonucleotide
caaaacatcctcgcacactgg

SEQ ID NO: 37057 - DNA, 21 bp, Artificial Sequence
  Description of Artificial Sequence: Synthetic oligonucleotide
caaaacaaaagcaacagctac

SEQ ID NO: 37058 - DNA, 21 bp, Artificial Sequence
  Description of Artificial Sequence: Synthetic oligonucleotide
caaaacctcccaagcgcatac

SEQ ID NO: 37059 - DNA, 21 bp, Artificial Sequence
  Description of Artificial Sequence: Synthetic oligonucleotide
caaaacctcacattcggaatg

SEQ ID NO: 37060 - DNA, 21 bp, Artificial Sequence
  Description of Artificial Sequence: Synthetic oligonucleotide
caaaacctcacaggaaaaagc

SEQ ID NO: 37061 - DNA, 21 bp, Artificial Sequence
  Description of Artificial Sequence: Synthetic oligonucleotide
caaaacatggtctgcgtcgca

SEQ ID NO: 37062 - DNA, 21 bp, Artificial Sequence
  Description of Artificial Sequence: Synthetic oligonucleotide
caaaacccaaacatcagcgga

SEQ ID NO: 37063 - DNA, 21 bp, Artificial Sequence
  Description of Artificial Sequence: Synthetic oligonucleotide
caaaacccaccacacatccaa

SEQ ID NO: 37064 - DNA, 21 bp, Artificial Sequence
  Description of Artificial Sequence: Synthetic oligonucleotide
caaaacccaagactcccactc

SEQ ID NO: 37065 - DNA, 21 bp, Artificial Sequence
  Description of Artificial Sequence: Synthetic oligonucleotide
caaaacccaagaacaggacaa

SEQ ID NO: 37066 - DNA, 21 bp, Artificial Sequence
  Description of Artificial Sequence: Synthetic oligonucleotide
caaaacccaacatacaaactc

SEQ ID NO: 37067 - DNA, 21 bp, Artificial Sequence
  Description of Artificial Sequence: Synthetic oligonucleotide
caaaacagaatcgtcgaacca

SEQ ID NO: 37068 - DNA, 21 bp, Artificial Sequence
  Description of Artificial Sequence: Synthetic oligonucleotide
caaaacagcgcaccagcaatc

SEQ ID NO: 37069 - DNA, 21 bp, Artificial Sequence
  Description of Artificial Sequence: Synthetic oligonucleotide
caaaacacaagcagcggactc

SEQ ID NO: 37070 - DNA, 21 bp, Artificial Sequence
  Description of Artificial Sequence: Synthetic oligonucleotide
caaaacgtcatgcacatgagc

SEQ ID NO: 37071 - DNA, 21 bp, Artificial Sequence
  Description of Artificial Sequence: Synthetic oligonucleotide
caaaacgtccaaagataccca

SEQ ID NO: 37072 - DNA, 21 bp, Artificial Sequence
  Description of Artificial Sequence: Synthetic oligonucleotide
caaaacgtcagaagccaaaca

SEQ ID NO: 37073 - DNA, 21 bp, Artificial Sequence
  Description of Artificial Sequence: Synthetic oligonucleotide
caaaactacctcaaaacagaa

SEQ ID NO: 37074 - DNA, 21 bp, Artificial Sequence
  Description of Artificial Sequence: Synthetic oligonucleotide
caaccagcagcaggacacttc

SEQ ID NO: 37075 - DNA, 21 bp, Artificial Sequence
  Description of Artificial Sequence: Synthetic oligonucleotide
caaccagcacactgcagcgac

SEQ ID NO: 37076 - DNA, 21 bp, Artificial Sequence
  Description of Artificial Sequence: Synthetic oligonucleotide
caaccagcaaaaggataccca

SEQ ID NO: 37077 - DNA, 21 bp, Artificial Sequence
  Description of Artificial Sequence: Synthetic oligonucleotide
caaccagcaccaacactcaga

SEQ ID NO: 37078 - DNA, 21 bp, Artificial Sequence
  Description of Artificial Sequence: Synthetic oligonucleotide
caaccagcaacagaagtcctc

SEQ ID NO: 37079 - DNA, 21 bp, Artificial Sequence
  Description of Artificial Sequence: Synthetic oligonucleotide
caaccagcagtcatggaaagc

SEQ ID NO: 37080 - DNA, 21 bp, Artificial Sequence
  Description of Artificial Sequence: Synthetic oligonucleotide
caaccagacccaagcccacca

SEQ ID NO: 37081 - DNA, 21 bp, Artificial Sequence
  Description of Artificial Sequence: Synthetic oligonucleotide
caaccattctacagcgacgaa

SEQ ID NO: 37082 - DNA, 21 bp, Artificial Sequence
  Description of Artificial Sequence: Synthetic oligonucleotide
caaccaggagtcagccacaca

SEQ ID NO: 37083 - DNA, 21 bp, Artificial Sequence
  Description of Artificial Sequence: Synthetic oligonucleotide
caaccacacggagacccaatg

SEQ ID NO: 37084 - DNA, 21 bp, Artificial Sequence
  Description of Artificial Sequence: Synthetic oligonucleotide
caaccaatcgcacacacagac

SEQ ID NO: 37085 - DNA, 21 bp, Artificial Sequence
  Description of Artificial Sequence: Synthetic oligonucleotide
caaccaatccaaacaagagca

SEQ ID NO: 37086 - DNA, 21 bp, Artificial Sequence
  Description of Artificial Sequence: Synthetic oligonucleotide
caaccaatcagcgcaacactc

SEQ ID NO: 37087 - DNA, 21 bp, Artificial Sequence
  Description of Artificial Sequence: Synthetic oligonucleotide
caaccaaaattctgcggagca

SEQ ID NO: 37088 - DNA, 21 bp, Artificial Sequence
  Description of Artificial Sequence: Synthetic oligonucleotide
caaccaaaactcagcgcaagc

SEQ ID NO: 37089 - DNA, 21 bp, Artificial Sequence
  Description of Artificial Sequence: Synthetic oligonucleotide
caaccaaaaagcagcggagtc

SEQ ID NO: 37090 - DNA, 21 bp, Artificial Sequence
  Description of Artificial Sequence: Synthetic oligonucleotide
caaccactcgcaagagcaagc

SEQ ID NO: 37091 - DNA, 21 bp, Artificial Sequence
  Description of Artificial Sequence: Synthetic oligonucleotide
caaccactcgcaagcaaaaca

SEQ ID NO: 37092 - DNA, 21 bp, Artificial Sequence
  Description of Artificial Sequence: Synthetic oligonucleotide
caaccactcctcagcgcaagc

SEQ ID NO: 37093 - DNA, 21 bp, Artificial Sequence
  Description of Artificial Sequence: Synthetic oligonucleotide
caaccactcacaatgagaagc

SEQ ID NO: 37094 - DNA, 21 bp, Artificial Sequence
  Description of Artificial Sequence: Synthetic oligonucleotide
caaccactcacaagcgacaca

SEQ ID NO: 37095 - DNA, 21 bp, Artificial Sequence
  Description of Artificial Sequence: Synthetic oligonucleotide
caaccaatgctcgtcgtcagc

SEQ ID NO: 37096 - DNA, 21 bp, Artificial Sequence
  Description of Artificial Sequence: Synthetic oligonucleotide
caaccaaacccagtcgcacac

SEQ ID NO: 37097 - DNA, 21 bp, Artificial Sequence
  Description of Artificial Sequence: Synthetic oligonucleotide
caaccaaactacccatgcgca

SEQ ID NO: 37098 - DNA, 21 bp, Artificial Sequence
  Description of Artificial Sequence: Synthetic oligonucleotide
caaccaccaggaatgagcagc

SEQ ID NO: 37099 - DNA, 21 bp, Artificial Sequence
  Description of Artificial Sequence: Synthetic oligonucleotide
caaccaccaaacacagaagac

SEQ ID NO: 37100 - DNA, 21 bp, Artificial Sequence
  Description of Artificial Sequence: Synthetic oligonucleotide
caaccaccaagaagccaactc

SEQ ID NO: 37101 - DNA, 21 bp, Artificial Sequence
  Description of Artificial Sequence: Synthetic oligonucleotide
caaccaccaagcccaatcagc

SEQ ID NO: 37102 - DNA, 21 bp, Artificial Sequence
  Description of Artificial Sequence: Synthetic oligonucleotide
caaccaccatacctcagcgga

SEQ ID NO: 37103 - DNA, 21 bp, Artificial Sequence
  Description of Artificial Sequence: Synthetic oligonucleotide
caaccacaaggaagagaacca

SEQ ID NO: 37104 - DNA, 21 bp, Artificial Sequence
  Description of Artificial Sequence: Synthetic oligonucleotide
caaccaagagcagaagtccca

SEQ ID NO: 37105 - DNA, 21 bp, Artificial Sequence
  Description of Artificial Sequence: Synthetic oligonucleotide
caaccaagagacgcaggaagc

SEQ ID NO: 37106 - DNA, 21 bp, Artificial Sequence
  Description of Artificial Sequence: Synthetic oligonucleotide
caaccaagactcctcgacaac

SEQ ID NO: 37107 - DNA, 21 bp, Artificial Sequence
  Description of Artificial Sequence: Synthetic oligonucleotide
caaccaagaacactcagcaca

SEQ ID NO: 37108 - DNA, 21 bp, Artificial Sequence
  Description of Artificial Sequence: Synthetic oligonucleotide
caaccaagcgcagcagcaaga

SEQ ID NO: 37109 - DNA, 21 bp, Artificial Sequence
  Description of Artificial Sequence: Synthetic oligonucleotide
caaccaagccacggaacacca

SEQ ID NO: 37110 - DNA, 21 bp, Artificial Sequence
  Description of Artificial Sequence: Synthetic oligonucleotide
caaccaagcctcgtcacactc

SEQ ID NO: 37111 - DNA, 21 bp, Artificial Sequence
  Description of Artificial Sequence: Synthetic oligonucleotide
caaccaagcatggaaccacaa

SEQ ID NO: 37112 - DNA, 21 bp, Artificial Sequence
  Description of Artificial Sequence: Synthetic oligonucleotide
caaccaagcatgcaaagcgaa

SEQ ID NO: 37113 - DNA, 21 bp, Artificial Sequence
  Description of Artificial Sequence: Synthetic oligonucleotide
caaccaagcaacatgggacac

SEQ ID NO: 37114 - DNA, 21 bp, Artificial Sequence
  Description of Artificial Sequence: Synthetic oligonucleotide
caaccaagcccaggattccac

SEQ ID NO: 37115 - DNA, 21 bp, Artificial Sequence
  Description of Artificial Sequence: Synthetic oligonucleotide
caaccaagcagccacccagtc

SEQ ID NO: 37116 - DNA, 21 bp, Artificial Sequence
  Description of Artificial Sequence: Synthetic oligonucleotide
caaccaacagacacactcagc

SEQ ID NO: 37117 - DNA, 21 bp, Artificial Sequence
  Description of Artificial Sequence: Synthetic oligonucleotide
caaccaacaccaacaccacac

SEQ ID NO: 37118 - DNA, 21 bp, Artificial Sequence
  Description of Artificial Sequence: Synthetic oligonucleotide
caaccagtcaacccaatgcac

SEQ ID NO: 37119 - DNA, 21 bp, Artificial Sequence
  Description of Artificial Sequence: Synthetic oligonucleotide
caaccagtcaacccaagagtc

SEQ ID NO: 37120 - DNA, 21 bp, Artificial Sequence
  Description of Artificial Sequence: Synthetic oligonucleotide
caaccagtcgtcacaccaaaa

SEQ ID NO: 37121 - DNA, 21 bp, Artificial Sequence
  Description of Artificial Sequence: Synthetic oligonucleotide
caaccatacagcagcagcctc

SEQ ID NO: 37122 - DNA, 21 bp, Artificial Sequence
  Description of Artificial Sequence: Synthetic oligonucleotide
caacaagcagacgcaacaatc

SEQ ID NO: 37123 - DNA, 21 bp, Artificial Sequence
  Description of Artificial Sequence: Synthetic oligonucleotide
caacaagcactcagcatggca

SEQ ID NO: 37124 - DNA, 21 bp, Artificial Sequence
  Description of Artificial Sequence: Synthetic oligonucleotide
caacaagcaccatacagacca

SEQ ID NO: 37125 - DNA, 21 bp, Artificial Sequence
  Description of Artificial Sequence: Synthetic oligonucleotide
caacaagaagtcgcaagactc

SEQ ID NO: 37126 - DNA, 21 bp, Artificial Sequence
  Description of Artificial Sequence: Synthetic oligonucleotide
caacaaggaagatgcccagac

SEQ ID NO: 37127 - DNA, 21 bp, Artificial Sequence
  Description of Artificial Sequence: Synthetic oligonucleotide
caacaaatcatcgaaagcctc

SEQ ID NO: 37128 - DNA, 21 bp, Artificial Sequence
  Description of Artificial Sequence: Synthetic oligonucleotide
caacaaaaaatgagctacgac

SEQ ID NO: 37129 - DNA, 21 bp, Artificial Sequence
  Description of Artificial Sequence: Synthetic oligonucleotide
caacaaagactcatgggagaa

SEQ ID NO: 37130 - DNA, 21 bp, Artificial Sequence
  Description of Artificial Sequence: Synthetic oligonucleotide
caacaaagactccaaatgatg

SEQ ID NO: 37131 - DNA, 21 bp, Artificial Sequence
  Description of Artificial Sequence: Synthetic oligonucleotide
caacaaagaagcagcctcctc

SEQ ID NO: 37132 - DNA, 21 bp, Artificial Sequence
  Description of Artificial Sequence: Synthetic oligonucleotide
caacaaagagtcaacccagaa

SEQ ID NO: 37133 - DNA, 21 bp, Artificial Sequence
  Description of Artificial Sequence: Synthetic oligonucleotide
caacaaagcaaccaaacaaaa

SEQ ID NO: 37134 - DNA, 21 bp, Artificial Sequence
  Description of Artificial Sequence: Synthetic oligonucleotide
caacaaacagcaggaagcgac

SEQ ID NO: 37135 - DNA, 21 bp, Artificial Sequence
  Description of Artificial Sequence: Synthetic oligonucleotide
caacaaacaggatacctccca

SEQ ID NO: 37136 - DNA, 21 bp, Artificial Sequence
  Description of Artificial Sequence: Synthetic oligonucleotide
caacaaacacacatgggaagc

SEQ ID NO: 37137 - DNA, 21 bp, Artificial Sequence
  Description of Artificial Sequence: Synthetic oligonucleotide
caacaaacaaaacaactccaa

SEQ ID NO: 37138 - DNA, 21 bp, Artificial Sequence
  Description of Artificial Sequence: Synthetic oligonucleotide
caacaaacaaaaagcacagca

SEQ ID NO: 37139 - DNA, 21 bp, Artificial Sequence
  Description of Artificial Sequence: Synthetic oligonucleotide
caacaaacaaacgacagaaac

SEQ ID NO: 37140 - DNA, 21 bp, Artificial Sequence
  Description of Artificial Sequence: Synthetic oligonucleotide
caacaaacaagaacaagcctc

SEQ ID NO: 37141 - DNA, 21 bp, Artificial Sequence
  Description of Artificial Sequence: Synthetic oligonucleotide
caacaaacaagcgcaagagaa

SEQ ID NO: 37142 - DNA, 21 bp, Artificial Sequence
  Description of Artificial Sequence: Synthetic oligonucleotide
caacaagtcaaaagcggagac

SEQ ID NO: 37143 - DNA, 21 bp, Artificial Sequence
  Description of Artificial Sequence: Synthetic oligonucleotide
caaagagcaccagacggatgg

SEQ ID NO: 37144 - DNA, 21 bp, Artificial Sequence
  Description of Artificial Sequence: Synthetic oligonucleotide
caaagagcaccagaaagcatg

SEQ ID NO: 37145 - DNA, 21 bp, Artificial Sequence
  Description of Artificial Sequence: Synthetic oligonucleotide
caaagagcacaactcaacagc

SEQ ID NO: 37146 - DNA, 21 bp, Artificial Sequence
  Description of Artificial Sequence: Synthetic oligonucleotide
caaagagcagtcgcaccaaca

SEQ ID NO: 37147 - DNA, 21 bp, Artificial Sequence
  Description of Artificial Sequence: Synthetic oligonucleotide
caaagagcagtccaagtctac

SEQ ID NO: 37148 - DNA, 21 bp, Artificial Sequence
  Description of Artificial Sequence: Synthetic oligonucleotide
caaagagacgcaagactcgac

SEQ ID NO: 37149 - DNA, 21 bp, Artificial Sequence
  Description of Artificial Sequence: Synthetic oligonucleotide
caaagaggaaaagaagcacac

SEQ ID NO: 37150 - DNA, 21 bp, Artificial Sequence
  Description of Artificial Sequence: Synthetic oligonucleotide
caaagaggaccaggaaaccaa

SEQ ID NO: 37151 - DNA, 21 bp, Artificial Sequence
  Description of Artificial Sequence: Synthetic oligonucleotide
caaagaggaccaatggaactc

SEQ ID NO: 37152 - DNA, 21 bp, Artificial Sequence
  Description of Artificial Sequence: Synthetic oligonucleotide
caaagaatcggaccagcactc

SEQ ID NO: 37153 - DNA, 21 bp, Artificial Sequence
  Description of Artificial Sequence: Synthetic oligonucleotide
caaagaatcccagtcgacgtc

SEQ ID NO: 37154 - DNA, 21 bp, Artificial Sequence
  Description of Artificial Sequence: Synthetic oligonucleotide
caaagactcgcaagcccaagc

SEQ ID NO: 37155 - DNA, 21 bp, Artificial Sequence
  Description of Artificial Sequence: Synthetic oligonucleotide
caaagactcacagcacaagaa

SEQ ID NO: 37156 - DNA, 21 bp, Artificial Sequence
  Description of Artificial Sequence: Synthetic oligonucleotide
caaagaatggcaaacatgagc

SEQ ID NO: 37157 - DNA, 21 bp, Artificial Sequence
  Description of Artificial Sequence: Synthetic oligonucleotide
caaagaatgacacaagacatg

SEQ ID NO: 37158 - DNA, 21 bp, Artificial Sequence
  Description of Artificial Sequence: Synthetic oligonucleotide
caaagaaacagcaacacattc

SEQ ID NO: 37159 - DNA, 21 bp, Artificial Sequence
  Description of Artificial Sequence: Synthetic oligonucleotide
caaagaccaggactccacatg

SEQ ID NO: 37160 - DNA, 21 bp, Artificial Sequence
  Description of Artificial Sequence: Synthetic oligonucleotide
caaagaccactcggaggactc

SEQ ID NO: 37161 - DNA, 21 bp, Artificial Sequence
  Description of Artificial Sequence: Synthetic oligonucleotide
caaagaccaccaagcgtcgac

SEQ ID NO: 37162 - DNA, 21 bp, Artificial Sequence
  Description of Artificial Sequence: Synthetic oligonucleotide
caaagaccaacagacagaaca

SEQ ID NO: 37163 - DNA, 21 bp, Artificial Sequence
  Description of Artificial Sequence: Synthetic oligonucleotide
caaagacaaccagtcctcgac

SEQ ID NO: 37164 - DNA, 21 bp, Artificial Sequence
  Description of Artificial Sequence: Synthetic oligonucleotide
caaagacaaagagacctccca

SEQ ID NO: 37165 - DNA, 21 bp, Artificial Sequence
  Description of Artificial Sequence: Synthetic oligonucleotide
caaagaagcgcaaacgtcgca

SEQ ID NO: 37166 - DNA, 21 bp, Artificial Sequence
  Description of Artificial Sequence: Synthetic oligonucleotide
caaagaagccacatgaaccca

SEQ ID NO: 37167 - DNA, 21 bp, Artificial Sequence
  Description of Artificial Sequence: Synthetic oligonucleotide
caaagaagcagcggaacacca

SEQ ID NO: 37168 - DNA, 21 bp, Artificial Sequence
  Description of Artificial Sequence: Synthetic oligonucleotide
caaagaagcacaaacctcaac

SEQ ID NO: 37169 - DNA, 21 bp, Artificial Sequence
  Description of Artificial Sequence: Synthetic oligonucleotide
caaagaacagtccaccaagga

SEQ ID NO: 37170 - DNA, 21 bp, Artificial Sequence
  Description of Artificial Sequence: Synthetic oligonucleotide
caaagaacagtcagaggagaa

SEQ ID NO: 37171 - DNA, 21 bp, Artificial Sequence
  Description of Artificial Sequence: Synthetic oligonucleotide
caaagagtcaacagcagcgga

SEQ ID NO: 37172 - DNA, 21 bp, Artificial Sequence
  Description of Artificial Sequence: Synthetic oligonucleotide
caaagcgcagacctcgactac

SEQ ID NO: 37173 - DNA, 21 bp, Artificial Sequence
  Description of Artificial Sequence: Synthetic oligonucleotide
caaagcgcagaagcagaagca

SEQ ID NO: 37174 - DNA, 21 bp, Artificial Sequence
  Description of Artificial Sequence: Synthetic oligonucleotide
caaagcgcacacccagcaaca

SEQ ID NO: 37175 - DNA, 21 bp, Artificial Sequence
  Description of Artificial Sequence: Synthetic oligonucleotide
caaagcgcaccagtcagagtc

SEQ ID NO: 37176 - DNA, 21 bp, Artificial Sequence
  Description of Artificial Sequence: Synthetic oligonucleotide
caaagcgcaagcgcactccaa

SEQ ID NO: 37177 - DNA, 21 bp, Artificial Sequence
  Description of Artificial Sequence: Synthetic oligonucleotide
caaagcgcaagcgtcatgaac

SEQ ID NO: 37178 - DNA, 21 bp, Artificial Sequence
  Description of Artificial Sequence: Synthetic oligonucleotide
caaagcgcagtcctcgaatac

SEQ ID NO: 37179 - DNA, 21 bp, Artificial Sequence
  Description of Artificial Sequence: Synthetic oligonucleotide
caaagcgacgactggccagtc

SEQ ID NO: 37180 - DNA, 21 bp, Artificial Sequence
  Description of Artificial Sequence: Synthetic oligonucleotide
caaagcgacatcagaaaccca

SEQ ID NO: 37181 - DNA, 21 bp, Artificial Sequence
  Description of Artificial Sequence: Synthetic oligonucleotide
caaagcgactgggtcccagtc

SEQ ID NO: 37182 - DNA, 21 bp, Artificial Sequence
  Description of Artificial Sequence: Synthetic oligonucleotide
caaagcgaaaaaggaacatac

SEQ ID NO: 37183 - DNA, 21 bp, Artificial Sequence
  Description of Artificial Sequence: Synthetic oligonucleotide
caaagcgaaatgatggacgca

SEQ ID NO: 37184 - DNA, 21 bp, Artificial Sequence
  Description of Artificial Sequence: Synthetic oligonucleotide
caaagcgaaagagcaacagtc

SEQ ID NO: 37185 - DNA, 21 bp, Artificial Sequence
  Description of Artificial Sequence: Synthetic oligonucleotide
caaagcttccaccacgaaaga

SEQ ID NO: 37186 - DNA, 21 bp, Artificial Sequence
  Description of Artificial Sequence: Synthetic oligonucleotide
caaagcttcccactccaagca

SEQ ID NO: 37187 - DNA, 21 bp, Artificial Sequence
  Description of Artificial Sequence: Synthetic oligonucleotide
caaagcggacaaggaatgtac

SEQ ID NO: 37188 - DNA, 21 bp, Artificial Sequence
  Description of Artificial Sequence: Synthetic oligonucleotide
caaagcggaagatggcactgg

SEQ ID NO: 37189 - DNA, 21 bp, Artificial Sequence
  Description of Artificial Sequence: Synthetic oligonucleotide
caaagcggaagcagcgcaaga

SEQ ID NO: 37190 - DNA, 21 bp, Artificial Sequence
  Description of Artificial Sequence: Synthetic oligonucleotide
caaagccacccattcaacgac

SEQ ID NO: 37191 - DNA, 21 bp, Artificial Sequence
  Description of Artificial Sequence: Synthetic oligonucleotide
caaagccacacacaaggaagc

SEQ ID NO: 37192 - DNA, 21 bp, Artificial Sequence
  Description of Artificial Sequence: Synthetic oligonucleotide
caaagcatcgcagtcacaatc

SEQ ID NO: 37193 - DNA, 21 bp, Artificial Sequence
  Description of Artificial Sequence: Synthetic oligonucleotide
caaagcatcgtcatcgcacac

SEQ ID NO: 37194 - DNA, 21 bp, Artificial Sequence
  Description of Artificial Sequence: Synthetic oligonucleotide
caaagcaaactcgcaagcctc

SEQ ID NO: 37195 - DNA, 21 bp, Artificial Sequence
  Description of Artificial Sequence: Synthetic oligonucleotide
caaagcaaactctacctcgaa

SEQ ID NO: 37196 - DNA, 21 bp, Artificial Sequence
  Description of Artificial Sequence: Synthetic oligonucleotide
caaagcaaaatgccaaactgg

SEQ ID NO: 37197 - DNA, 21 bp, Artificial Sequence
  Description of Artificial Sequence: Synthetic oligonucleotide
caaagcctcaacgacctcaaa

SEQ ID NO: 37198 - DNA, 21 bp, Artificial Sequence
  Description of Artificial Sequence: Synthetic oligonucleotide
caaagcatgagcagcacactc

SEQ ID NO: 37199 - DNA, 21 bp, Artificial Sequence
  Description of Artificial Sequence: Synthetic oligonucleotide
caaagcaaccaagacagacaa

SEQ ID NO: 37200 - DNA, 21 bp, Artificial Sequence
  Description of Artificial Sequence: Synthetic oligonucleotide
caaagcaacagcagcaacaca

SEQ ID NO: 37201 - DNA, 21 bp, Artificial Sequence
  Description of Artificial Sequence: Synthetic oligonucleotide
caaagcccaggacacccaagc

SEQ ID NO: 37202 - DNA, 21 bp, Artificial Sequence
  Description of Artificial Sequence: Synthetic oligonucleotide
caaagcccaaaagaatgctac

SEQ ID NO: 37203 - DNA, 21 bp, Artificial Sequence
  Description of Artificial Sequence: Synthetic oligonucleotide
caaagcccactctacgcaagc

SEQ ID NO: 37204 - DNA, 21 bp, Artificial Sequence
  Description of Artificial Sequence: Synthetic oligonucleotide
caaagcccaaacctcccactc

SEQ ID NO: 37205 - DNA, 21 bp, Artificial Sequence
  Description of Artificial Sequence: Synthetic oligonucleotide
caaagcccaccaagcacagac

SEQ ID NO: 37206 - DNA, 21 bp, Artificial Sequence
  Description of Artificial Sequence: Synthetic oligonucleotide
caaagcccaagaaactacgtc

SEQ ID NO: 37207 - DNA, 21 bp, Artificial Sequence
  Description of Artificial Sequence: Synthetic oligonucleotide
caaagcccaacaaacgacatg

SEQ ID NO: 37208 - DNA, 21 bp, Artificial Sequence
  Description of Artificial Sequence: Synthetic oligonucleotide
caaagccaagcaccacacgga

SEQ ID NO: 37209 - DNA, 21 bp, Artificial Sequence
  Description of Artificial Sequence: Synthetic oligonucleotide
caaagcagagacatcccaaca

SEQ ID NO: 37210 - DNA, 21 bp, Artificial Sequence
  Description of Artificial Sequence: Synthetic oligonucleotide
caaagcagaggagcactccca

SEQ ID NO: 37211 - DNA, 21 bp, Artificial Sequence
  Description of Artificial Sequence: Synthetic oligonucleotide
caaagcagactcggaagcttc

SEQ ID NO: 37212 - DNA, 21 bp, Artificial Sequence
  Description of Artificial Sequence: Synthetic oligonucleotide
caaagcagaacaatgacacca

SEQ ID NO: 37213 - DNA, 21 bp, Artificial Sequence
  Description of Artificial Sequence: Synthetic oligonucleotide
caaagcagaacaccaagccca

SEQ ID NO: 37214 - DNA, 21 bp, Artificial Sequence
  Description of Artificial Sequence: Synthetic oligonucleotide
caaagcagcgcaatcagctac

SEQ ID NO: 37215 - DNA, 21 bp, Artificial Sequence
  Description of Artificial Sequence: Synthetic oligonucleotide
caaagcagcgcaagaggaatg

SEQ ID NO: 37216 - DNA, 21 bp, Artificial Sequence
  Description of Artificial Sequence: Synthetic oligonucleotide
caaagcagcgcaacaagaaac

SEQ ID NO: 37217 - DNA, 21 bp, Artificial Sequence
  Description of Artificial Sequence: Synthetic oligonucleotide
caaagcagcgcagtcctcaca

SEQ ID NO: 37218 - DNA, 21 bp, Artificial Sequence
  Description of Artificial Sequence: Synthetic oligonucleotide
caaagcagcgacacaggagaa

SEQ ID NO: 37219 - DNA, 21 bp, Artificial Sequence
  Description of Artificial Sequence: Synthetic oligonucleotide
caaagcagcggacaaacagtc

SEQ ID NO: 37220 - DNA, 21 bp, Artificial Sequence
  Description of Artificial Sequence: Synthetic oligonucleotide
caaagcagcaaaatcgtctac

SEQ ID NO: 37221 - DNA, 21 bp, Artificial Sequence
  Description of Artificial Sequence: Synthetic oligonucleotide
caaagcagcctcagcctcagc

SEQ ID NO: 37222 - DNA, 21 bp, Artificial Sequence
  Description of Artificial Sequence: Synthetic oligonucleotide
caaagcagcatgccacaaaca

SEQ ID NO: 37223 - DNA, 21 bp, Artificial Sequence
  Description of Artificial Sequence: Synthetic oligonucleotide
caaagcagcaacttccaaagc

SEQ ID NO: 37224 - DNA, 21 bp, Artificial Sequence
  Description of Artificial Sequence: Synthetic oligonucleotide
caaagcagcagagcaatggga

SEQ ID NO: 37225 - DNA, 21 bp, Artificial Sequence
  Description of Artificial Sequence: Synthetic oligonucleotide
caaagcagcagaccaagccca

SEQ ID NO: 37226 - DNA, 21 bp, Artificial Sequence
  Description of Artificial Sequence: Synthetic oligonucleotide
caaagcagcacactccaaagc

SEQ ID NO: 37227 - DNA, 21 bp, Artificial Sequence
  Description of Artificial Sequence: Synthetic oligonucleotide
caaagcacagaccaaaaagac

SEQ ID NO: 37228 - DNA, 21 bp, Artificial Sequence
  Description of Artificial Sequence: Synthetic oligonucleotide
caaagcacaggagcactcaga

SEQ ID NO: 37229 - DNA, 21 bp, Artificial Sequence
  Description of Artificial Sequence: Synthetic oligonucleotide
caaagcacaaacgaaagcagc

SEQ ID NO: 37230 - DNA, 21 bp, Artificial Sequence
  Description of Artificial Sequence: Synthetic oligonucleotide
caaagcacacaactcgaccac

SEQ ID NO: 37231 - DNA, 21 bp, Artificial Sequence
  Description of Artificial Sequence: Synthetic oligonucleotide
caaagcacacaaagcgacaaa

SEQ ID NO: 37232 - DNA, 21 bp, Artificial Sequence
  Description of Artificial Sequence: Synthetic oligonucleotide
caaagcacaacaagacaccca

SEQ ID NO: 37233 - DNA, 21 bp, Artificial Sequence
  Description of Artificial Sequence: Synthetic oligonucleotide
caaagcacagtcacagtcaga

SEQ ID NO: 37234 - DNA, 21 bp, Artificial Sequence
  Description of Artificial Sequence: Synthetic oligonucleotide
caaagcgtccacagcccactc

SEQ ID NO: 37235 - DNA, 21 bp, Artificial Sequence
  Description of Artificial Sequence: Synthetic oligonucleotide
caaagcgtcaaatacgacaga

SEQ ID NO: 37236 - DNA, 21 bp, Artificial Sequence
  Description of Artificial Sequence: Synthetic oligonucleotide
caaagcgtcatgacagcacca

SEQ ID NO: 37237 - DNA, 21 bp, Artificial Sequence
  Description of Artificial Sequence: Synthetic oligonucleotide
caaagcgtcaacgcagaactc

SEQ ID NO: 37238 - DNA, 21 bp, Artificial Sequence
  Description of Artificial Sequence: Synthetic oligonucleotide
caaagcgtcccactcgcaagc

SEQ ID NO: 37239 - DNA, 21 bp, Artificial Sequence
  Description of Artificial Sequence: Synthetic oligonucleotide
caaagctacgaagcaagagga

SEQ ID NO: 37240 - DNA, 21 bp, Artificial Sequence
  Description of Artificial Sequence: Synthetic oligonucleotide
caaagctacaacggactcgga

SEQ ID NO: 37241 - DNA, 21 bp, Artificial Sequence
  Description of Artificial Sequence: Synthetic oligonucleotide
caaacagcaggaagactcgca

SEQ ID NO: 37242 - DNA, 21 bp, Artificial Sequence
  Description of Artificial Sequence: Synthetic oligonucleotide
caaacagcaaacaaaccagtc

SEQ ID NO: 37243 - DNA, 21 bp, Artificial Sequence
  Description of Artificial Sequence: Synthetic oligonucleotide
caaacagacggagcaaaagac

SEQ ID NO: 37244 - DNA, 21 bp, Artificial Sequence
  Description of Artificial Sequence: Synthetic oligonucleotide
caaacagacagagcatacgtc

SEQ ID NO: 37245 - DNA, 21 bp, Artificial Sequence
  Description of Artificial Sequence: Synthetic oligonucleotide
caaacagacgtcgacgacatg

SEQ ID NO: 37246 - DNA, 21 bp, Artificial Sequence
  Description of Artificial Sequence: Synthetic oligonucleotide
caaacattcggaggaccagga

SEQ ID NO: 37247 - DNA, 21 bp, Artificial Sequence
  Description of Artificial Sequence: Synthetic oligonucleotide
caaacaggaggaagaagccca

SEQ ID NO: 37248 - DNA, 21 bp, Artificial Sequence
  Description of Artificial Sequence: Synthetic oligonucleotide
caaacaggactcaaccaagac

SEQ ID NO: 37249 - DNA, 21 bp, Artificial Sequence
  Description of Artificial Sequence: Synthetic oligonucleotide
caaacaggaccaacaagagac

SEQ ID NO: 37250 - DNA, 21 bp, Artificial Sequence
  Description of Artificial Sequence: Synthetic oligonucleotide
caaacaggaagagaaccaatg

SEQ ID NO: 37251 - DNA, 21 bp, Artificial Sequence
  Description of Artificial Sequence: Synthetic oligonucleotide
caaacaggaagcagctacagc

SEQ ID NO: 37252 - DNA, 21 bp, Artificial Sequence
  Description of Artificial Sequence: Synthetic oligonucleotide
caaacaatcagaacagaagac

SEQ ID NO: 37253 - DNA, 21 bp, Artificial Sequence
  Description of Artificial Sequence: Synthetic oligonucleotide
caaacaatcagcaaagaccca

SEQ ID NO: 37254 - DNA, 21 bp, Artificial Sequence
  Description of Artificial Sequence: Synthetic oligonucleotide
caaacaaaacacggagaaagc

SEQ ID NO: 37255 - DNA, 21 bp, Artificial Sequence
  Description of Artificial Sequence: Synthetic oligonucleotide
caaacaaaaaacacacaccca

SEQ ID NO: 37256 - DNA, 21 bp, Artificial Sequence
  Description of Artificial Sequence: Synthetic oligonucleotide
caaacaaaaagcctcatccca

SEQ ID NO: 37257 - DNA, 21 bp, Artificial Sequence
  Description of Artificial Sequence: Synthetic oligonucleotide
caaacactccaacacgcaaca

SEQ ID NO: 37258 - DNA, 21 bp, Artificial Sequence
  Description of Artificial Sequence: Synthetic oligonucleotide
caaacactcagcggaatgaga

SEQ ID NO: 37259 - DNA, 21 bp, Artificial Sequence
  Description of Artificial Sequence: Synthetic oligonucleotide
caaacaatgatgccagtccca

SEQ ID NO: 37260 - DNA, 21 bp, Artificial Sequence
  Description of Artificial Sequence: Synthetic oligonucleotide
caaacaatgagaagcgcagga

SEQ ID NO: 37261 - DNA, 21 bp, Artificial Sequence
  Description of Artificial Sequence: Synthetic oligonucleotide
caaacaaacatgcaaagccca

SEQ ID NO: 37262 - DNA, 21 bp, Artificial Sequence
  Description of Artificial Sequence: Synthetic oligonucleotide
caaacaaacccaaacatggtc

SEQ ID NO: 37263 - DNA, 21 bp, Artificial Sequence
  Description of Artificial Sequence: Synthetic oligonucleotide
caaacaaacacagcaacaaaa

SEQ ID NO: 37264 - DNA, 21 bp, Artificial Sequence
  Description of Artificial Sequence: Synthetic oligonucleotide
caaacaccaccaagcgcagca

SEQ ID NO: 37265 - DNA, 21 bp, Artificial Sequence
  Description of Artificial Sequence: Synthetic oligonucleotide
caaacaccaccaacaaacaga

SEQ ID NO: 37266 - DNA, 21 bp, Artificial Sequence
  Description of Artificial Sequence: Synthetic oligonucleotide
caaacaccaagagtcatccaa

SEQ ID NO: 37267 - DNA, 21 bp, Artificial Sequence
  Description of Artificial Sequence: Synthetic oligonucleotide
caaacaccaagcatgacaaga

SEQ ID NO: 37268 - DNA, 21 bp, Artificial Sequence
  Description of Artificial Sequence: Synthetic oligonucleotide
caaacaccaagctacctcgga

SEQ ID NO: 37269 - DNA, 21 bp, Artificial Sequence
  Description of Artificial Sequence: Synthetic oligonucleotide
caaacacaaatcagagtcgga

SEQ ID NO: 37270 - DNA, 21 bp, Artificial Sequence
  Description of Artificial Sequence: Synthetic oligonucleotide
caaacacaaccacaaagcagc

SEQ ID NO: 37271 - DNA, 21 bp, Artificial Sequence
  Description of Artificial Sequence: Synthetic oligonucleotide
caaacacaaagcctctaccca

SEQ ID NO: 37272 - DNA, 21 bp, Artificial Sequence
  Description of Artificial Sequence: Synthetic oligonucleotide
caaacacaaagcccagtccca

SEQ ID NO: 37273 - DNA, 21 bp, Artificial Sequence
  Description of Artificial Sequence: Synthetic oligonucleotide
caaacacaagtcagctacgga

SEQ ID NO: 37274 - DNA, 21 bp, Artificial Sequence
  Description of Artificial Sequence: Synthetic oligonucleotide
caaacaagacacgacctcctc

SEQ ID NO: 37275 - DNA, 21 bp, Artificial Sequence
  Description of Artificial Sequence: Synthetic oligonucleotide
caaacaagactcgcacaacac

SEQ ID NO: 37276 - DNA, 21 bp, Artificial Sequence
  Description of Artificial Sequence: Synthetic oligonucleotide
caaacaagactcccagcaagc

SEQ ID NO: 37277 - DNA, 21 bp, Artificial Sequence
  Description of Artificial Sequence: Synthetic oligonucleotide
caaacaagcgcagcaagagtc

SEQ ID NO: 37278 - DNA, 21 bp, Artificial Sequence
  Description of Artificial Sequence: Synthetic oligonucleotide
caaacaagcccaggagtcatg

SEQ ID NO: 37279 - DNA, 21 bp, Artificial Sequence
  Description of Artificial Sequence: Synthetic oligonucleotide
caaacaagcacagacaacgca

SEQ ID NO: 37280 - DNA, 21 bp, Artificial Sequence
  Description of Artificial Sequence: Synthetic oligonucleotide
caaacaagcgtccacctcaaa

SEQ ID NO: 37281 - DNA, 21 bp, Artificial Sequence
  Description of Artificial Sequence: Synthetic oligonucleotide
caaacaacagcaagagcacaa

SEQ ID NO: 37282 - DNA, 21 bp, Artificial Sequence
  Description of Artificial Sequence: Synthetic oligonucleotide
caaacagtccacgcattcgga

SEQ ID NO: 37283 - DNA, 21 bp, Artificial Sequence
  Description of Artificial Sequence: Synthetic oligonucleotide
caaacagtcagactcacaagc

SEQ ID NO: 37284 - DNA, 21 bp, Artificial Sequence
  Description of Artificial Sequence: Synthetic oligonucleotide
caaacagtcagcgcactcgga

SEQ ID NO: 37285 - DNA, 21 bp, Artificial Sequence
  Description of Artificial Sequence: Synthetic oligonucleotide
caaacatacgacccagcaagc

SEQ ID NO: 37286 - DNA, 21 bp, Artificial Sequence
  Description of Artificial Sequence: Synthetic oligonucleotide
caaacataccacacactcgaa

SEQ ID NO: 37287 - DNA, 21 bp, Artificial Sequence
  Description of Artificial Sequence: Synthetic oligonucleotide
caaacatacccaacaatggaa

SEQ ID NO: 37288 - DNA, 21 bp, Artificial Sequence
  Description of Artificial Sequence: Synthetic oligonucleotide
caagtcgcaggaatgaaattc

SEQ ID NO: 37289 - DNA, 21 bp, Artificial Sequence
  Description of Artificial Sequence: Synthetic oligonucleotide
caagtcgcaagcccatacaga

SEQ ID NO: 37290 - DNA, 21 bp, Artificial Sequence
  Description of Artificial Sequence: Synthetic oligonucleotide
caagtcgacagaagcccacac

SEQ ID NO: 37291 - DNA, 21 bp, Artificial Sequence
  Description of Artificial Sequence: Synthetic oligonucleotide
caagtcgaacacggacaaaca

SEQ ID NO: 37292 - DNA, 21 bp, Artificial Sequence
  Description of Artificial Sequence: Synthetic oligonucleotide
caagtcgaaagagaagcatgg

SEQ ID NO: 37293 - DNA, 21 bp, Artificial Sequence
  Description of Artificial Sequence: Synthetic oligonucleotide
caagtcggaggaagagcattc

SEQ ID NO: 37294 - DNA, 21 bp, Artificial Sequence
  Description of Artificial Sequence: Synthetic oligonucleotide
caagtcggaaaagtcacactc

SEQ ID NO: 37295 - DNA, 21 bp, Artificial Sequence
  Description of Artificial Sequence: Synthetic oligonucleotide
caagtcggagtcaaaaacgga

SEQ ID NO: 37296 - DNA, 21 bp, Artificial Sequence
  Description of Artificial Sequence: Synthetic oligonucleotide
caagtcctcaacggaagagaa

SEQ ID NO: 37297 - DNA, 21 bp, Artificial Sequence
  Description of Artificial Sequence: Synthetic oligonucleotide
caagtcatgccaaacgtcagc

SEQ ID NO: 37298 - DNA, 21 bp, Artificial Sequence
  Description of Artificial Sequence: Synthetic oligonucleotide
caagtcccattcccagcagac

SEQ ID NO: 37299 - DNA, 21 bp, Artificial Sequence
  Description of Artificial Sequence: Synthetic oligonucleotide
caagtcccactcagcctcgaa

SEQ ID NO: 37300 - DNA, 21 bp, Artificial Sequence
  Description of Artificial Sequence: Synthetic oligonucleotide
caagtcccatacgcaccagca

SEQ ID NO: 37301 - DNA, 21 bp, Artificial Sequence
  Description of Artificial Sequence: Synthetic oligonucleotide
caagtccaaccagtccacatc

SEQ ID NO: 37302 - DNA, 21 bp, Artificial Sequence
  Description of Artificial Sequence: Synthetic oligonucleotide
caagtcagagcagcagtcaca

SEQ ID NO: 37303 - DNA, 21 bp, Artificial Sequence
  Description of Artificial Sequence: Synthetic oligonucleotide
caagtcagagacagctacagc

SEQ ID NO: 37304 - DNA, 21 bp, Artificial Sequence
  Description of Artificial Sequence: Synthetic oligonucleotide
caagtcagagaaccagcaatc

SEQ ID NO: 37305 - DNA, 21 bp, Artificial Sequence
  Description of Artificial Sequence: Synthetic oligonucleotide
caagtcagagaaagcagcagc

SEQ ID NO: 37306 - DNA, 21 bp, Artificial Sequence
  Description of Artificial Sequence: Synthetic oligonucleotide
caagtcagactcgaaccaagc

SEQ ID NO: 37307 - DNA, 21 bp, Artificial Sequence
  Description of Artificial Sequence: Synthetic oligonucleotide
caagtcagaccaggactcctc

SEQ ID NO: 37308 - DNA, 21 bp, Artificial Sequence
  Description of Artificial Sequence: Synthetic oligonucleotide
caagtcagccacagagacagc

SEQ ID NO: 37309 - DNA, 21 bp, Artificial Sequence
  Description of Artificial Sequence: Synthetic oligonucleotide
caagtcagcctcggaagcgtc

SEQ ID NO: 37310 - DNA, 21 bp, Artificial Sequence
  Description of Artificial Sequence: Synthetic oligonucleotide
caagtcagcccaagcctcaac

SEQ ID NO: 37311 - DNA, 21 bp, Artificial Sequence
  Description of Artificial Sequence: Synthetic oligonucleotide
caagtcagcagcccagtccca

SEQ ID NO: 37312 - DNA, 21 bp, Artificial Sequence
  Description of Artificial Sequence: Synthetic oligonucleotide
caagtcacaaaaagccacaca

SEQ ID NO: 37313 - DNA, 21 bp, Artificial Sequence
  Description of Artificial Sequence: Synthetic oligonucleotide
caagtcgtcgcaagcctcgga

SEQ ID NO: 37314 - DNA, 21 bp, Artificial Sequence
  Description of Artificial Sequence: Synthetic oligonucleotide
caagtcgtcccacaccaagaa

SEQ ID NO: 37315 - DNA, 21 bp, Artificial Sequence
  Description of Artificial Sequence: Synthetic oligonucleotide
caagtcgtcagaagcagcagc

SEQ ID NO: 37316 - DNA, 21 bp, Artificial Sequence
  Description of Artificial Sequence: Synthetic oligonucleotide
caagtctacacaaaccaatac

SEQ ID NO: 37317 - DNA, 21 bp, Artificial Sequence
  Description of Artificial Sequence: Synthetic oligonucleotide
caatgggcaaacacaggagaa

SEQ ID NO: 37318 - DNA, 21 bp, Artificial Sequence
  Description of Artificial Sequence: Synthetic oligonucleotide
caatgggaagaccacagcaca

SEQ ID NO: 37319 - DNA, 21 bp, Artificial Sequence
  Description of Artificial Sequence: Synthetic oligonucleotide
caatacggagacggaccaaaa

SEQ ID NO: 37320 - DNA, 21 bp, Artificial Sequence
  Description of Artificial Sequence: Synthetic oligonucleotide
caatacggacaacaacacagc

SEQ ID NO: 37321 - DNA, 21 bp, Artificial Sequence
  Description of Artificial Sequence: Synthetic oligonucleotide
caatacggaagcgtccacgga

SEQ ID NO: 37322 - DNA, 21 bp, Artificial Sequence
  Description of Artificial Sequence: Synthetic oligonucleotide
caataccacgcaagcggaaaa

SEQ ID NO: 37323 - DNA, 21 bp, Artificial Sequence
  Description of Artificial Sequence: Synthetic oligonucleotide
caatacaaaagagcagaactc

SEQ ID NO: 37324 - DNA, 21 bp, Artificial Sequence
  Description of Artificial Sequence: Synthetic oligonucleotide
caatacaaaacagacatgaca

SEQ ID NO: 37325 - DNA, 21 bp, Artificial Sequence
  Description of Artificial Sequence: Synthetic oligonucleotide
caatacaaaacaggagcacaa

SEQ ID NO: 37326 - DNA, 21 bp, Artificial Sequence
  Description of Artificial Sequence: Synthetic oligonucleotide
caatacctcgcaacacacgga

SEQ ID NO: 37327 - DNA, 21 bp, Artificial Sequence
  Description of Artificial Sequence: Synthetic oligonucleotide
caatacccaaacagcgacaca

SEQ ID NO: 37328 - DNA, 21 bp, Artificial Sequence
  Description of Artificial Sequence: Synthetic oligonucleotide
caatacccagtcagcccaagc

SEQ ID NO: 37329 - DNA, 21 bp, Artificial Sequence
  Description of Artificial Sequence: Synthetic oligonucleotide
caatacacagcaagcaacagc

SEQ ID NO: 37330 - DNA, 21 bp, Artificial Sequence
  Description of Artificial Sequence: Synthetic oligonucleotide
caatacacaggaacacaaaaa

SEQ ID NO: 37331 - DNA, 21 bp, Artificial Sequence
  Description of Artificial Sequence: Synthetic oligonucleotide
caatacacagtcctcacagaa

SEQ ID NO: 37332 - DNA, 21 bp, Artificial Sequence
  Description of Artificial Sequence: Synthetic oligonucleotide
caatacgtcggaatcggaaca

SEQ ID NO: 37333 - DNA, 21 bp, Artificial Sequence
  Description of Artificial Sequence: Synthetic oligonucleotide
agagcagcagcatacggagca

SEQ ID NO: 37334 - DNA, 21 bp, Artificial Sequence
  Description of Artificial Sequence: Synthetic oligonucleotide
agagcagcaatgatgaaccca

SEQ ID NO: 37335 - DNA, 21 bp, Artificial Sequence
  Description of Artificial Sequence: Synthetic oligonucleotide
agagcagcaatggtcgcagtc

SEQ ID NO: 37336 - DNA, 21 bp, Artificial Sequence
  Description of Artificial Sequence: Synthetic oligonucleotide
agagcagcaaacgacttccca

SEQ ID NO: 37337 - DNA, 21 bp, Artificial Sequence
  Description of Artificial Sequence: Synthetic oligonucleotide
agagcagcaccaacaagcagc

SEQ ID NO: 37338 - DNA, 21 bp, Artificial Sequence
  Description of Artificial Sequence: Synthetic oligonucleotide
agagcagcaacagtcccaaac

SEQ ID NO: 37339 - DNA, 21 bp, Artificial Sequence
  Description of Artificial Sequence: Synthetic oligonucleotide
agagcagacaaaggaccaagc

SEQ ID NO: 37340 - DNA, 21 bp, Artificial Sequence
  Description of Artificial Sequence: Synthetic oligonucleotide
agagcagacccaagaccagga

SEQ ID NO: 37341 - DNA, 21 bp, Artificial Sequence
  Description of Artificial Sequence: Synthetic oligonucleotide
agagcagacagagcaacatac

SEQ ID NO: 37342 - DNA, 21 bp, Artificial Sequence
  Description of Artificial Sequence: Synthetic oligonucleotide
agagcagacgtcccaccagtc

SEQ ID NO: 37343 - DNA, 21 bp, Artificial Sequence
  Description of Artificial Sequence: Synthetic oligonucleotide
agagcagactaccaccacaac

SEQ ID NO: 37344 - DNA, 21 bp, Artificial Sequence
  Description of Artificial Sequence: Synthetic oligonucleotide
agagcagaagcagtctgggac

SEQ ID NO: 37345 - DNA, 21 bp, Artificial Sequence
  Description of Artificial Sequence: Synthetic oligonucleotide
agagcagaaaacatcagcaga

SEQ ID NO: 37346 - DNA, 21 bp, Artificial Sequence
  Description of Artificial Sequence: Synthetic oligonucleotide
agagcagaaagcctcctcgga

SEQ ID NO: 37347 - DNA, 21 bp, Artificial Sequence
  Description of Artificial Sequence: Synthetic oligonucleotide
agagcagaagtcctctacaca

SEQ ID NO: 37348 - DNA, 21 bp, Artificial Sequence
  Description of Artificial Sequence: Synthetic oligonucleotide
agagcagaataccaaagccca

SEQ ID NO: 37349 - DNA, 21 bp, Artificial Sequence
  Description of Artificial Sequence: Synthetic oligonucleotide
agagcattcggacaaagccca

SEQ ID NO: 37350 - DNA, 21 bp, Artificial Sequence
  Description of Artificial Sequence: Synthetic oligonucleotide
agagcattcccaaacgacagc

SEQ ID NO: 37351 - DNA, 21 bp, Artificial Sequence
  Description of Artificial Sequence: Synthetic oligonucleotide
agagcattcagccaagcagaa

SEQ ID NO: 37352 - DNA, 21 bp, Artificial Sequence
  Description of Artificial Sequence: Synthetic oligonucleotide
agagcaggactcagcccaaac

SEQ ID NO: 37353 - DNA, 21 bp, Artificial Sequence
  Description of Artificial Sequence: Synthetic oligonucleotide
agagcaggaccagtcagcaca

SEQ ID NO: 37354 - DNA, 21 bp, Artificial Sequence
  Description of Artificial Sequence: Synthetic oligonucleotide
agagcaggaagctacgaaagc

SEQ ID NO: 37355 - DNA, 21 bp, Artificial Sequence
  Description of Artificial Sequence: Synthetic oligonucleotide
agagcaggagtccaatgcatc

SEQ ID NO: 37356 - DNA, 21 bp, Artificial Sequence
  Description of Artificial Sequence: Synthetic oligonucleotide
agagcacacggaagcggagca

SEQ ID NO: 37357 - DNA, 21 bp, Artificial Sequence
  Description of Artificial Sequence: Synthetic oligonucleotide
agagcaatcgcacaagcagtc

SEQ ID NO: 37358 - DNA, 21 bp, Artificial Sequence
  Description of Artificial Sequence: Synthetic oligonucleotide
agagcaatcgacctcccaaaa

SEQ ID NO: 37359 - DNA, 21 bp, Artificial Sequence
  Description of Artificial Sequence: Synthetic oligonucleotide
agagcaatcgacagcgtccca

SEQ ID NO: 37360 - DNA, 21 bp, Artificial Sequence
  Description of Artificial Sequence: Synthetic oligonucleotide
agagcaatcaaaagcgaccca

SEQ ID NO: 37361 - DNA, 21 bp, Artificial Sequence
  Description of Artificial Sequence: Synthetic oligonucleotide
agagcaatcccaacaccagga

SEQ ID NO: 37362 - DNA, 21 bp, Artificial Sequence
  Description of Artificial Sequence: Synthetic oligonucleotide
agagcactcgacgtcaacgca

SEQ ID NO: 37363 - DNA, 21 bp, Artificial Sequence
  Description of Artificial Sequence: Synthetic oligonucleotide
agagcactcctcaacctccaa

SEQ ID NO: 37364 - DNA, 21 bp, Artificial Sequence
  Description of Artificial Sequence: Synthetic oligonucleotide
agagcactccaaacaacaagc

SEQ ID NO: 37365 - DNA, 21 bp, Artificial Sequence
  Description of Artificial Sequence: Synthetic oligonucleotide
agagcactcagcgcaaacgtc

SEQ ID NO: 37366 - DNA, 21 bp, Artificial Sequence
  Description of Artificial Sequence: Synthetic oligonucleotide
agagcactcagcagcctccca

SEQ ID NO: 37367 - DNA, 21 bp, Artificial Sequence
  Description of Artificial Sequence: Synthetic oligonucleotide
agagcactcacagacctcgtc

SEQ ID NO: 37368 - DNA, 21 bp, Artificial Sequence
  Description of Artificial Sequence: Synthetic oligonucleotide
agagcaatgggaaacgtcctc

SEQ ID NO: 37369 - DNA, 21 bp, Artificial Sequence
  Description of Artificial Sequence: Synthetic oligonucleotide
agagcaatgctcgacagagca

SEQ ID NO: 37370 - DNA, 21 bp, Artificial Sequence
  Description of Artificial Sequence: Synthetic oligonucleotide
agagcaatgccaggagaagtc

SEQ ID NO: 37371 - DNA, 21 bp, Artificial Sequence
  Description of Artificial Sequence: Synthetic oligonucleotide
agagcaatgccaccaagcagc

SEQ ID NO: 37372 - DNA, 21 bp, Artificial Sequence
  Description of Artificial Sequence: Synthetic oligonucleotide
agagcaaacgacccaccacca

SEQ ID NO: 37373 - DNA, 21 bp, Artificial Sequence
  Description of Artificial Sequence: Synthetic oligonucleotide
agagcaaacctcaacatccca

SEQ ID NO: 37374 - DNA, 21 bp, Artificial Sequence
  Description of Artificial Sequence: Synthetic oligonucleotide
agagcaccagaaacagaactc

SEQ ID NO: 37375 - DNA, 21 bp, Artificial Sequence
  Description of Artificial Sequence: Synthetic oligonucleotide
agagcaccaccaagcccaaaa

SEQ ID NO: 37376 - DNA, 21 bp, Artificial Sequence
  Description of Artificial Sequence: Synthetic oligonucleotide
agagcaccacaaggaagcaca

SEQ ID NO: 37377 - DNA, 21 bp, Artificial Sequence
  Description of Artificial Sequence: Synthetic oligonucleotide
agagcaccacaaggatacgga

SEQ ID NO: 37378 - DNA, 21 bp, Artificial Sequence
  Description of Artificial Sequence: Synthetic oligonucleotide
agagcaccaagaccaatcgaa

SEQ ID NO: 37379 - DNA, 21 bp, Artificial Sequence
  Description of Artificial Sequence: Synthetic oligonucleotide
agagcaccagtcagcccaatg

SEQ ID NO: 37380 - DNA, 21 bp, Artificial Sequence
  Description of Artificial Sequence: Synthetic oligonucleotide
agagcacaaccaagcctccac

SEQ ID NO: 37381 - DNA, 21 bp, Artificial Sequence
  Description of Artificial Sequence: Synthetic oligonucleotide
agagcacaaagcccactcagc

SEQ ID NO: 37382 - DNA, 21 bp, Artificial Sequence
  Description of Artificial Sequence: Synthetic oligonucleotide
agagcacaaacaacactcagc

SEQ ID NO: 37383 - DNA, 21 bp, Artificial Sequence
  Description of Artificial Sequence: Synthetic oligonucleotide
agagcacaatacagccaagac

SEQ ID NO: 37384 - DNA, 21 bp, Artificial Sequence
  Description of Artificial Sequence: Synthetic oligonucleotide
agagcacaatacacaggaaac

SEQ ID NO: 37385 - DNA, 21 bp, Artificial Sequence
  Description of Artificial Sequence: Synthetic oligonucleotide
agagcaagcttcccaccagac

SEQ ID NO: 37386 - DNA, 21 bp, Artificial Sequence
  Description of Artificial Sequence: Synthetic oligonucleotide
agagcaagccacgacacaaac

SEQ ID NO: 37387 - DNA, 21 bp, Artificial Sequence
  Description of Artificial Sequence: Synthetic oligonucleotide
agagcaagcctcagagtcgaa

SEQ ID NO: 37388 - DNA, 21 bp, Artificial Sequence
  Description of Artificial Sequence: Synthetic oligonucleotide
agagcaagcaacagaccagac

SEQ ID NO: 37389 - DNA, 21 bp, Artificial Sequence
  Description of Artificial Sequence: Synthetic oligonucleotide
agagcaagcccaacaacaagc

SEQ ID NO: 37390 - DNA, 21 bp, Artificial Sequence
  Description of Artificial Sequence: Synthetic oligonucleotide
agagcaagcagcgaactccca

SEQ ID NO: 37391 - DNA, 21 bp, Artificial Sequence
  Description of Artificial Sequence: Synthetic oligonucleotide
agagcaagcagcagcgaagac

SEQ ID NO: 37392 - DNA, 21 bp, Artificial Sequence
  Description of Artificial Sequence: Synthetic oligonucleotide
agagcaagcagcgtcgacatg

SEQ ID NO: 37393 - DNA, 21 bp, Artificial Sequence
  Description of Artificial Sequence: Synthetic oligonucleotide
agagcaagcacaggaatggca

SEQ ID NO: 37394 - DNA, 21 bp, Artificial Sequence
  Description of Artificial Sequence: Synthetic oligonucleotide
agagcaagcacacacacactc

SEQ ID NO: 37395 - DNA, 21 bp, Artificial Sequence
  Description of Artificial Sequence: Synthetic oligonucleotide
agagcaacagaacacagcttc

SEQ ID NO: 37396 - DNA, 21 bp, Artificial Sequence
  Description of Artificial Sequence: Synthetic oligonucleotide
agagcaacagaaccagcattc

SEQ ID NO: 37397 - DNA, 21 bp, Artificial Sequence
  Description of Artificial Sequence: Synthetic oligonucleotide
agagcaacactcccaaaaaca

SEQ ID NO: 37398 - DNA, 21 bp, Artificial Sequence
  Description of Artificial Sequence: Synthetic oligonucleotide
agagcaacaaacgacagagca

SEQ ID NO: 37399 - DNA, 21 bp, Artificial Sequence
  Description of Artificial Sequence: Synthetic oligonucleotide
agagcaacaaacgacagcaca

SEQ ID NO: 37400 - DNA, 21 bp, Artificial Sequence
  Description of Artificial Sequence: Synthetic oligonucleotide
agagcaacaaacacaatcctc

SEQ ID NO: 37401 - DNA, 21 bp, Artificial Sequence
  Description of Artificial Sequence: Synthetic oligonucleotide
agagcaacaacaagcacattc

SEQ ID NO: 37402 - DNA, 21 bp, Artificial Sequence
  Description of Artificial Sequence: Synthetic oligonucleotide
agagcagtcgaagacagacac

SEQ ID NO: 37403 - DNA, 21 bp, Artificial Sequence
  Description of Artificial Sequence: Synthetic oligonucleotide
agagcagtcctcaacatcgga

SEQ ID NO: 37404 - DNA, 21 bp, Artificial Sequence
  Description of Artificial Sequence: Synthetic oligonucleotide
agagcagtccaaccaatgctc

SEQ ID NO: 37405 - DNA, 21 bp, Artificial Sequence
  Description of Artificial Sequence: Synthetic oligonucleotide
agagcagtcagcctccaagca

SEQ ID NO: 37406 - DNA, 21 bp, Artificial Sequence
  Description of Artificial Sequence: Synthetic oligonucleotide
agagcagtctaccaaacacaa

SEQ ID NO: 37407 - DNA, 21 bp, Artificial Sequence
  Description of Artificial Sequence: Synthetic oligonucleotide
agagcatacggaccaacaaac

SEQ ID NO: 37408 - DNA, 21 bp, Artificial Sequence
  Description of Artificial Sequence: Synthetic oligonucleotide
agagcatacatgacagaccca

SEQ ID NO: 37409 - DNA, 21 bp, Artificial Sequence
  Description of Artificial Sequence: Synthetic oligonucleotide
agagcatacaacgcagtcgtc

SEQ ID NO: 37410 - DNA, 21 bp, Artificial Sequence
  Description of Artificial Sequence: Synthetic oligonucleotide
agagcatacccagtcgacgac

SEQ ID NO: 37411 - DNA, 21 bp, Artificial Sequence
  Description of Artificial Sequence: Synthetic oligonucleotide
agagacgcagcaagcagctgc

SEQ ID NO: 37412 - DNA, 21 bp, Artificial Sequence
  Description of Artificial Sequence: Synthetic oligonucleotide
agagacgacagcagcctcctc

SEQ ID NO: 37413 - DNA, 21 bp, Artificial Sequence
  Description of Artificial Sequence: Synthetic oligonucleotide
agagacgacgtcagaacatac

SEQ ID NO: 37414 - DNA, 21 bp, Artificial Sequence
  Description of Artificial Sequence: Synthetic oligonucleotide
agagacggagaaatggaccca

SEQ ID NO: 37415 - DNA, 21 bp, Artificial Sequence
  Description of Artificial Sequence: Synthetic oligonucleotide
agagacggaaaatgggtcgca

SEQ ID NO: 37416 - DNA, 21 bp, Artificial Sequence
  Description of Artificial Sequence: Synthetic oligonucleotide
agagacggacaacacacaagc

SEQ ID NO: 37417 - DNA, 21 bp, Artificial Sequence
  Description of Artificial Sequence: Synthetic oligonucleotide
agagaccacctcacagtcgca

SEQ ID NO: 37418 - DNA, 21 bp, Artificial Sequence
  Description of Artificial Sequence: Synthetic oligonucleotide
agagacatcgcagcaaaaaca

SEQ ID NO: 37419 - DNA, 21 bp, Artificial Sequence
  Description of Artificial Sequence: Synthetic oligonucleotide
agagacaaaagcgaccacgca

SEQ ID NO: 37420 - DNA, 21 bp, Artificial Sequence
  Description of Artificial Sequence: Synthetic oligonucleotide
agagacctcaaaacacaaagc

SEQ ID NO: 37421 - DNA, 21 bp, Artificial Sequence
  Description of Artificial Sequence: Synthetic oligonucleotide
agagacctccaacacctcagc

SEQ ID NO: 37422 - DNA, 21 bp, Artificial Sequence
  Description of Artificial Sequence: Synthetic oligonucleotide
agagacctcagcagcgaaagc

SEQ ID NO: 37423 - DNA, 21 bp, Artificial Sequence
  Description of Artificial Sequence: Synthetic oligonucleotide
agagacaacaaagcaaacatc

SEQ ID NO: 37424 - DNA, 21 bp, Artificial Sequence
  Description of Artificial Sequence: Synthetic oligonucleotide
agagacaacagcagcgtcgtc

SEQ ID NO: 37425 - DNA, 21 bp, Artificial Sequence
  Description of Artificial Sequence: Synthetic oligonucleotide
agagacccaaacatcaaccca

SEQ ID NO: 37426 - DNA, 21 bp, Artificial Sequence
  Description of Artificial Sequence: Synthetic oligonucleotide
agagacccaagagcaggattc

SEQ ID NO: 37427 - DNA, 21 bp, Artificial Sequence
  Description of Artificial Sequence: Synthetic oligonucleotide
agagacccaagagcacacctc

SEQ ID NO: 37428 - DNA, 21 bp, Artificial Sequence
  Description of Artificial Sequence: Synthetic oligonucleotide
agagacccaagaggacaagga

SEQ ID NO: 37429 - DNA, 21 bp, Artificial Sequence
  Description of Artificial Sequence: Synthetic oligonucleotide
agagaccaagcaagcaaaaac

SEQ ID NO: 37430 - DNA, 21 bp, Artificial Sequence
  Description of Artificial Sequence: Synthetic oligonucleotide
agagaccaaggactcgaaagc

SEQ ID NO: 37431 - DNA, 21 bp, Artificial Sequence
  Description of Artificial Sequence: Synthetic oligonucleotide
agagaccaagtcgcaacacca

SEQ ID NO: 37432 - DNA, 21 bp, Artificial Sequence
  Description of Artificial Sequence: Synthetic oligonucleotide
agagacagagacccaacaagc

SEQ ID NO: 37433 - DNA, 21 bp, Artificial Sequence
  Description of Artificial Sequence: Synthetic oligonucleotide
agagacagagaaccagcactc

SEQ ID NO: 37434 - DNA, 21 bp, Artificial Sequence
  Description of Artificial Sequence: Synthetic oligonucleotide
agagacagagaagtcagctgg

SEQ ID NO: 37435 - DNA, 21 bp, Artificial Sequence
  Description of Artificial Sequence: Synthetic oligonucleotide
agagacagcgcattcgcagtc

SEQ ID NO: 37436 - DNA, 21 bp, Artificial Sequence
  Description of Artificial Sequence: Synthetic oligonucleotide
agagacagcaaaagcaacagc

SEQ ID NO: 37437 - DNA, 21 bp, Artificial Sequence
  Description of Artificial Sequence: Synthetic oligonucleotide
agagacagcaaagtcagccac

SEQ ID NO: 37438 - DNA, 21 bp, Artificial Sequence
  Description of Artificial Sequence: Synthetic oligonucleotide
agagacagcctcgaaacacaa

SEQ ID NO: 37439 - DNA, 21 bp, Artificial Sequence
  Description of Artificial Sequence: Synthetic oligonucleotide
agagacagcatgctcgtcgca

SEQ ID NO: 37440 - DNA, 21 bp, Artificial Sequence
  Description of Artificial Sequence: Synthetic oligonucleotide
agagacagcatgccagcagca

SEQ ID NO: 37441 - DNA, 21 bp, Artificial Sequence
  Description of Artificial Sequence: Synthetic oligonucleotide
agagacagcagaatgctcagc

SEQ ID NO: 37442 - DNA, 21 bp, Artificial Sequence
  Description of Artificial Sequence: Synthetic oligonucleotide
agagacagcagccacttccca

SEQ ID NO: 37443 - DNA, 21 bp, Artificial Sequence
  Description of Artificial Sequence: Synthetic oligonucleotide
agagacagcagcctctacctc

SEQ ID NO: 37444 - DNA, 21 bp, Artificial Sequence
  Description of Artificial Sequence: Synthetic oligonucleotide
agagacagcagctacacagac

SEQ ID NO: 37445 - DNA, 21 bp, Artificial Sequence
  Description of Artificial Sequence: Synthetic oligonucleotide
agagacacaatcatcagcgca

SEQ ID NO: 37446 - DNA, 21 bp, Artificial Sequence
  Description of Artificial Sequence: Synthetic oligonucleotide
agagacacaagcctcccagtc

SEQ ID NO: 37447 - DNA, 21 bp, Artificial Sequence
  Description of Artificial Sequence: Synthetic oligonucleotide
agagacacaagcagcatcgga

SEQ ID NO: 37448 - DNA, 21 bp, Artificial Sequence
  Description of Artificial Sequence: Synthetic oligonucleotide
agagacgtcgcagcaagaagc

SEQ ID NO: 37449 - DNA, 21 bp, Artificial Sequence
  Description of Artificial Sequence: Synthetic oligonucleotide
agagacgtcgcaatgcaagac

SEQ ID NO: 37450 - DNA, 21 bp, Artificial Sequence
  Description of Artificial Sequence: Synthetic oligonucleotide
agagacgtcccacaagcagtc

SEQ ID NO: 37451 - DNA, 21 bp, Artificial Sequence
  Description of Artificial Sequence: Synthetic oligonucleotide
agagacgtcagcggaccagtc

SEQ ID NO: 37452 - DNA, 21 bp, Artificial Sequence
  Description of Artificial Sequence: Synthetic oligonucleotide
agagacgtcagcatcccaagc

SEQ ID NO: 37453 - DNA, 21 bp, Artificial Sequence
  Description of Artificial Sequence: Synthetic oligonucleotide
agagacgtcagcagactccca

SEQ ID NO: 37454 - DNA, 21 bp, Artificial Sequence
  Description of Artificial Sequence: Synthetic oligonucleotide
agagacgtcacaagactccca

SEQ ID NO: 37455 - DNA, 21 bp, Artificial Sequence
  Description of Artificial Sequence: Synthetic oligonucleotide
agagaagcagcattcgcagac

SEQ ID NO: 37456 - DNA, 21 bp, Artificial Sequence
  Description of Artificial Sequence: Synthetic oligonucleotide
agagaagcaggaggagcaagc

SEQ ID NO: 37457 - DNA, 21 bp, Artificial Sequence
  Description of Artificial Sequence: Synthetic oligonucleotide
agagaagcaggaggactcgca

SEQ ID NO: 37458 - DNA, 21 bp, Artificial Sequence
  Description of Artificial Sequence: Synthetic oligonucleotide
agagaagcaaaaccagcatgg

SEQ ID NO: 37459 - DNA, 21 bp, Artificial Sequence
  Description of Artificial Sequence: Synthetic oligonucleotide
agagaagcagtcacaaaagca

SEQ ID NO: 37460 - DNA, 21 bp, Artificial Sequence
  Description of Artificial Sequence: Synthetic oligonucleotide
agagaagcatacgaaacacca

SEQ ID NO: 37461 - DNA, 21 bp, Artificial Sequence
  Description of Artificial Sequence: Synthetic oligonucleotide
agagaagacaacagcaacgac

SEQ ID NO: 37462 - DNA, 21 bp, Artificial Sequence
  Description of Artificial Sequence: Synthetic oligonucleotide
agagaaggaggacaaagcaga

SEQ ID NO: 37463 - DNA, 21 bp, Artificial Sequence
  Description of Artificial Sequence: Synthetic oligonucleotide
agagaaggactctacagccac

SEQ ID NO: 37464 - DNA, 21 bp, Artificial Sequence
  Description of Artificial Sequence: Synthetic oligonucleotide
agagaaatcggatgcacagga

SEQ ID NO: 37465 - DNA, 21 bp, Artificial Sequence
  Description of Artificial Sequence: Synthetic oligonucleotide
agagaaaaaacagacagattc

SEQ ID NO: 37466 - DNA, 21 bp, Artificial Sequence
  Description of Artificial Sequence: Synthetic oligonucleotide
agagaactcgaaggattcaca

SEQ ID NO: 37467 - DNA, 21 bp, Artificial Sequence
  Description of Artificial Sequence: Synthetic oligonucleotide
agagaactcagcccaatgtac

SEQ ID NO: 37468 - DNA, 21 bp, Artificial Sequence
  Description of Artificial Sequence: Synthetic oligonucleotide
agagaactcagctacgcaagc

SEQ ID NO: 37469 - DNA, 21 bp, Artificial Sequence
  Description of Artificial Sequence: Synthetic oligonucleotide
agagaaatgctcccaagcagc

SEQ ID NO: 37470 - DNA, 21 bp, Artificial Sequence
  Description of Artificial Sequence: Synthetic oligonucleotide
agagaaaacggactcagcctc

SEQ ID NO: 37471 - DNA, 21 bp, Artificial Sequence
  Description of Artificial Sequence: Synthetic oligonucleotide
agagaaaacctcgcagcagga

SEQ ID NO: 37472 - DNA, 21 bp, Artificial Sequence
  Description of Artificial Sequence: Synthetic oligonucleotide
agagaaaacaacacagtcaaa

SEQ ID NO: 37473 - DNA, 21 bp, Artificial Sequence
  Description of Artificial Sequence: Synthetic oligonucleotide
agagaaccacacacaagcaac

SEQ ID NO: 37474 - DNA, 21 bp, Artificial Sequence
  Description of Artificial Sequence: Synthetic oligonucleotide
agagaaccaccaacactcagc

SEQ ID NO: 37475 - DNA, 21 bp, Artificial Sequence
  Description of Artificial Sequence: Synthetic oligonucleotide
agagaacaattcagaaacctc

SEQ ID NO: 37476 - DNA, 21 bp, Artificial Sequence
  Description of Artificial Sequence: Synthetic oligonucleotide
agagaaagaagcgcactcaca

SEQ ID NO: 37477 - DNA, 21 bp, Artificial Sequence
  Description of Artificial Sequence: Synthetic oligonucleotide
agagaaagaagcccaatgcca

SEQ ID NO: 37478 - DNA, 21 bp, Artificial Sequence
  Description of Artificial Sequence: Synthetic oligonucleotide
agagaaagctgcccagacgca

SEQ ID NO: 37479 - DNA, 21 bp, Artificial Sequence
  Description of Artificial Sequence: Synthetic oligonucleotide
agagaaagccacaaaggacca

SEQ ID NO: 37480 - DNA, 21 bp, Artificial Sequence
  Description of Artificial Sequence: Synthetic oligonucleotide
agagaaagcctcaacaacatg

SEQ ID NO: 37481 - DNA, 21 bp, Artificial Sequence
  Description of Artificial Sequence: Synthetic oligonucleotide
agagaaagcacaacacacgga

SEQ ID NO: 37482 - DNA, 21 bp, Artificial Sequence
  Description of Artificial Sequence: Synthetic oligonucleotide
agagaaagcgtcagcatcaac

SEQ ID NO: 37483 - DNA, 21 bp, Artificial Sequence
  Description of Artificial Sequence: Synthetic oligonucleotide
agagaaagctacgaaagcgga

SEQ ID NO: 37484 - DNA, 21 bp, Artificial Sequence
  Description of Artificial Sequence: Synthetic oligonucleotide
agagaaacactcggaagccca

SEQ ID NO: 37485 - DNA, 21 bp, Artificial Sequence
  Description of Artificial Sequence: Synthetic oligonucleotide
agagaaacaatggcaagcaca

SEQ ID NO: 37486 - DNA, 21 bp, Artificial Sequence
  Description of Artificial Sequence: Synthetic oligonucleotide
agagaaacaccaaacatccca

SEQ ID NO: 37487 - DNA, 21 bp, Artificial Sequence
  Description of Artificial Sequence: Synthetic oligonucleotide
agagaaacaagcagcagccaa

SEQ ID NO: 37488 - DNA, 21 bp, Artificial Sequence
  Description of Artificial Sequence: Synthetic oligonucleotide
agagaaacagtcagaaacgtc

SEQ ID NO: 37489 - DNA, 21 bp, Artificial Sequence
  Description of Artificial Sequence: Synthetic oligonucleotide
agagaagtcctcagcacatgc

SEQ ID NO: 37490 - DNA, 21 bp, Artificial Sequence
  Description of Artificial Sequence: Synthetic oligonucleotide
agagaagtcagcgcaagccca

SEQ ID NO: 37491 - DNA, 21 bp, Artificial Sequence
  Description of Artificial Sequence: Synthetic oligonucleotide
agagaagtcagcttcgactgg

SEQ ID NO: 37492 - DNA, 21 bp, Artificial Sequence
  Description of Artificial Sequence: Synthetic oligonucleotide
agagaatacccaagcggaagc

SEQ ID NO: 37493 - DNA, 21 bp, Artificial Sequence
  Description of Artificial Sequence: Synthetic oligonucleotide
agattcgcagaaacaagacca

SEQ ID NO: 37494 - DNA, 21 bp, Artificial Sequence
  Description of Artificial Sequence: Synthetic oligonucleotide
agattcgcaggagcaggagtc

SEQ ID NO: 37495 - DNA, 21 bp, Artificial Sequence
  Description of Artificial Sequence: Synthetic oligonucleotide
agattcgcaggaagcctcatc

SEQ ID NO: 37496 - DNA, 21 bp, Artificial Sequence
  Description of Artificial Sequence: Synthetic oligonucleotide
agattcgcaaacagcggagtc

SEQ ID NO: 37497 - DNA, 21 bp, Artificial Sequence
  Description of Artificial Sequence: Synthetic oligonucleotide
agattcgaactcgcacacaac

SEQ ID NO: 37498 - DNA, 21 bp, Artificial Sequence
  Description of Artificial Sequence: Synthetic oligonucleotide
agattcgaaagcagcgtccca

SEQ ID NO: 37499 - DNA, 21 bp, Artificial Sequence
  Description of Artificial Sequence: Synthetic oligonucleotide
agattccacgcagcaacaagc

SEQ ID NO: 37500 - DNA, 21 bp, Artificial Sequence
  Description of Artificial Sequence: Synthetic oligonucleotide
agattcaaagaaatgccaatg

SEQ ID NO: 37501 - DNA, 21 bp, Artificial Sequence
  Description of Artificial Sequence: Synthetic oligonucleotide
agattcaaaacaacaggagaa

SEQ ID NO: 37502 - DNA, 21 bp, Artificial Sequence
  Description of Artificial Sequence: Synthetic oligonucleotide
agattcccacaaccagaccca

SEQ ID NO: 37503 - DNA, 21 bp, Artificial Sequence
  Description of Artificial Sequence: Synthetic oligonucleotide
agattcccagtcgacggagtc

SEQ ID NO: 37504 - DNA, 21 bp, Artificial Sequence
  Description of Artificial Sequence: Synthetic oligonucleotide
agattcagcgacagcagaatg

SEQ ID NO: 37505 - DNA, 21 bp, Artificial Sequence
  Description of Artificial Sequence: Synthetic oligonucleotide
agattcagcggaatggtcgaa

SEQ ID NO: 37506 - DNA, 21 bp, Artificial Sequence
  Description of Artificial Sequence: Synthetic oligonucleotide
agattcagccaaagcccagca

SEQ ID NO: 37507 - DNA, 21 bp, Artificial Sequence
  Description of Artificial Sequence: Synthetic oligonucleotide
agattcagcacaggaccaagc

SEQ ID NO: 37508 - DNA, 21 bp, Artificial Sequence
  Description of Artificial Sequence: Synthetic oligonucleotide
agattcagcacacaacaaagc

SEQ ID NO: 37509 - DNA, 21 bp, Artificial Sequence
  Description of Artificial Sequence: Synthetic oligonucleotide
agattcgtcccagacagacca

SEQ ID NO: 37510 - DNA, 21 bp, Artificial Sequence
  Description of Artificial Sequence: Synthetic oligonucleotide
agaggagcagcaccagtcaca

SEQ ID NO: 37511 - DNA, 21 bp, Artificial Sequence
  Description of Artificial Sequence: Synthetic oligonucleotide
agaggagcagaactcggagga

SEQ ID NO: 37512 - DNA, 21 bp, Artificial Sequence
  Description of Artificial Sequence: Synthetic oligonucleotide
agaggagcaggagacgcacac

SEQ ID NO: 37513 - DNA, 21 bp, Artificial Sequence
  Description of Artificial Sequence: Synthetic oligonucleotide
agaggagcaggaccaagcaca

SEQ ID NO: 37514 - DNA, 21 bp, Artificial Sequence
  Description of Artificial Sequence: Synthetic oligonucleotide
agaggagcaatcgcaacaagc

SEQ ID NO: 37515 - DNA, 21 bp, Artificial Sequence
  Description of Artificial Sequence: Synthetic oligonucleotide
agaggagcaatcggaaacgga

SEQ ID NO: 37516 - DNA, 21 bp, Artificial Sequence
  Description of Artificial Sequence: Synthetic oligonucleotide
agaggagcaatcccactccca

SEQ ID NO: 37517 - DNA, 21 bp, Artificial Sequence
  Description of Artificial Sequence: Synthetic oligonucleotide
agaggagcaacagtcgcacca

SEQ ID NO: 37518 - DNA, 21 bp, Artificial Sequence
  Description of Artificial Sequence: Synthetic oligonucleotide
agaggagacggagtcagcctc

SEQ ID NO: 37519 - DNA, 21 bp, Artificial Sequence
  Description of Artificial Sequence: Synthetic oligonucleotide
agaggagacccaggactcgga

SEQ ID NO: 37520 - DNA, 21 bp, Artificial Sequence
  Description of Artificial Sequence: Synthetic oligonucleotide
agaggagaaaacagcaaccca

SEQ ID NO: 37521 - DNA, 21 bp, Artificial Sequence
  Description of Artificial Sequence: Synthetic oligonucleotide
agaggagaaagaagcgtcttc

SEQ ID NO: 37522 - DNA, 21 bp, Artificial Sequence
  Description of Artificial Sequence: Synthetic oligonucleotide
agaggagaaagcgcaagcaca

SEQ ID NO: 37523 - DNA, 21 bp, Artificial Sequence
  Description of Artificial Sequence: Synthetic oligonucleotide
agaggaggaggactcagcatg

SEQ ID NO: 37524 - DNA, 21 bp, Artificial Sequence
  Description of Artificial Sequence: Synthetic oligonucleotide
agaggaggaacaatgacaatc

SEQ ID NO: 37525 - DNA, 21 bp, Artificial Sequence
  Description of Artificial Sequence: Synthetic oligonucleotide
agaggaggaacaaacgtcgaa

SEQ ID NO: 37526 - DNA, 21 bp, Artificial Sequence
  Description of Artificial Sequence: Synthetic oligonucleotide
agaggacaccacgacaacgaa

SEQ ID NO: 37527 - DNA, 21 bp, Artificial Sequence
  Description of Artificial Sequence: Synthetic oligonucleotide
agaggacacctcagcgaccca

SEQ ID NO: 37528 - DNA, 21 bp, Artificial Sequence
  Description of Artificial Sequence: Synthetic oligonucleotide
agaggaatcgaactcagagga

SEQ ID NO: 37529 - DNA, 21 bp, Artificial Sequence
  Description of Artificial Sequence: Synthetic oligonucleotide
agaggaatcgaactcacagtc

SEQ ID NO: 37530 - DNA, 21 bp, Artificial Sequence
  Description of Artificial Sequence: Synthetic oligonucleotide
agaggaatcccagcaatcgca

SEQ ID NO: 37531 - DNA, 21 bp, Artificial Sequence
  Description of Artificial Sequence: Synthetic oligonucleotide
agaggaaaagaaccattccca

SEQ ID NO: 37532 - DNA, 21 bp, Artificial Sequence
  Description of Artificial Sequence: Synthetic oligonucleotide
agaggactcggaaacggaaca

SEQ ID NO: 37533 - DNA, 21 bp, Artificial Sequence
  Description of Artificial Sequence: Synthetic oligonucleotide
agaggaatggcagtcccagga

SEQ ID NO: 37534 - DNA, 21 bp, Artificial Sequence
  Description of Artificial Sequence: Synthetic oligonucleotide
agaggaaacgaatggagcctc

SEQ ID NO: 37535 - DNA, 21 bp, Artificial Sequence
  Description of Artificial Sequence: Synthetic oligonucleotide
agaggaccagcaacagcaagc

SEQ ID NO: 37536 - DNA, 21 bp, Artificial Sequence
  Description of Artificial Sequence: Synthetic oligonucleotide
agaggaccagacacaggagca

SEQ ID NO: 37537 - DNA, 21 bp, Artificial Sequence
  Description of Artificial Sequence: Synthetic oligonucleotide
agaggaccaggagaaccaaac

SEQ ID NO: 37538 - DNA, 21 bp, Artificial Sequence
  Description of Artificial Sequence: Synthetic oligonucleotide
agaggaccactcacaagcgaa

SEQ ID NO: 37539 - DNA, 21 bp, Artificial Sequence
  Description of Artificial Sequence: Synthetic oligonucleotide
agaggaccaccaccagcaaca

SEQ ID NO: 37540 - DNA, 21 bp, Artificial Sequence
  Description of Artificial Sequence: Synthetic oligonucleotide
agaggaccaagcacaagcgac

SEQ ID NO: 37541 - DNA, 21 bp, Artificial Sequence
  Description of Artificial Sequence: Synthetic oligonucleotide
agaggaccagtcacaagagac

SEQ ID NO: 37542 - DNA, 21 bp, Artificial Sequence
  Description of Artificial Sequence: Synthetic oligonucleotide
agaggacaacacaacctcagc

SEQ ID NO: 37543 - DNA, 21 bp, Artificial Sequence
  Description of Artificial Sequence: Synthetic oligonucleotide
agaggacaaacaatcagagaa

SEQ ID NO: 37544 - DNA, 21 bp, Artificial Sequence
  Description of Artificial Sequence: Synthetic oligonucleotide
agaggaagcgcaggagtcgca

SEQ ID NO: 37545 - DNA, 21 bp, Artificial Sequence
  Description of Artificial Sequence: Synthetic oligonucleotide
agaggaagcgacgcaagcgca

SEQ ID NO: 37546 - DNA, 21 bp, Artificial Sequence
  Description of Artificial Sequence: Synthetic oligonucleotide
agaggaagcggaacactcaca

SEQ ID NO: 37547 - DNA, 21 bp, Artificial Sequence
  Description of Artificial Sequence: Synthetic oligonucleotide
agaggaagcatgctcggagac

SEQ ID NO: 37548 - DNA, 21 bp, Artificial Sequence
  Description of Artificial Sequence: Synthetic oligonucleotide
agaggaagcaacgcaagcgga

SEQ ID NO: 37549 - DNA, 21 bp, Artificial Sequence
  Description of Artificial Sequence: Synthetic oligonucleotide
agaggaagcccagcagcaaca

SEQ ID NO: 37550 - DNA, 21 bp, Artificial Sequence
  Description of Artificial Sequence: Synthetic oligonucleotide
agaggaagcccacaaagcagc

SEQ ID NO: 37551 - DNA, 21 bp, Artificial Sequence
  Description of Artificial Sequence: Synthetic oligonucleotide
agaggaagccaaacaggaaac

SEQ ID NO: 37552 - DNA, 21 bp, Artificial Sequence
  Description of Artificial Sequence: Synthetic oligonucleotide
agaggaagccaaacaagcttc

SEQ ID NO: 37553 - DNA, 21 bp, Artificial Sequence
  Description of Artificial Sequence: Synthetic oligonucleotide
agaggaagcagcacaatcgaa

SEQ ID NO: 37554 - DNA, 21 bp, Artificial Sequence
  Description of Artificial Sequence: Synthetic oligonucleotide
agaggaagcacagcaaacgca

SEQ ID NO: 37555 - DNA, 21 bp, Artificial Sequence
  Description of Artificial Sequence: Synthetic oligonucleotide
agaggaagcacagtcatgttc

SEQ ID NO: 37556 - DNA, 21 bp, Artificial Sequence
  Description of Artificial Sequence: Synthetic oligonucleotide
agaggaacagcacacctcctc

SEQ ID NO: 37557 - DNA, 21 bp, Artificial Sequence
  Description of Artificial Sequence: Synthetic oligonucleotide
agaggaacagaaagcccaagc

SEQ ID NO: 37558 - DNA, 21 bp, Artificial Sequence
  Description of Artificial Sequence: Synthetic oligonucleotide
agaggaacaggaaacctcaac

SEQ ID NO: 37559 - DNA, 21 bp, Artificial Sequence
  Description of Artificial Sequence: Synthetic oligonucleotide
agaggaacaggaacagcatgg

SEQ ID NO: 37560 - DNA, 21 bp, Artificial Sequence
  Description of Artificial Sequence: Synthetic oligonucleotide
agaggaacaatgatggcagca

SEQ ID NO: 37561 - DNA, 21 bp, Artificial Sequence
  Description of Artificial Sequence: Synthetic oligonucleotide
agaggaacaaacacactccaa

SEQ ID NO: 37562 - DNA, 21 bp, Artificial Sequence
  Description of Artificial Sequence: Synthetic oligonucleotide
agaggagtcgcagtcccacca

SEQ ID NO: 37563 - DNA, 21 bp, Artificial Sequence
  Description of Artificial Sequence: Synthetic oligonucleotide
agaggagtccacagcccagac

SEQ ID NO: 37564 - DNA, 21 bp, Artificial Sequence
  Description of Artificial Sequence: Synthetic oligonucleotide
agaggagtcatgtacggagac

SEQ ID NO: 37565 - DNA, 21 bp, Artificial Sequence
  Description of Artificial Sequence: Synthetic oligonucleotide
agacacgcaggacaagacaac

SEQ ID NO: 37566 - DNA, 21 bp, Artificial Sequence
  Description of Artificial Sequence: Synthetic oligonucleotide
agacacgcaccagtcgcaagc

SEQ ID NO: 37567 - DNA, 21 bp, Artificial Sequence
  Description of Artificial Sequence: Synthetic oligonucleotide
agacacgcagtcagcaacttc

SEQ ID NO: 37568 - DNA, 21 bp, Artificial Sequence
  Description of Artificial Sequence: Synthetic oligonucleotide
agacacgacagaatggacaac

SEQ ID NO: 37569 - DNA, 21 bp, Artificial Sequence
  Description of Artificial Sequence: Synthetic oligonucleotide
agacacgaactccacagcaca

SEQ ID NO: 37570 - DNA, 21 bp, Artificial Sequence
  Description of Artificial Sequence: Synthetic oligonucleotide
agacacgaaaacatcagagac

SEQ ID NO: 37571 - DNA, 21 bp, Artificial Sequence
  Description of Artificial Sequence: Synthetic oligonucleotide
agacacgaaagaccaatggca

SEQ ID NO: 37572 - DNA, 21 bp, Artificial Sequence
  Description of Artificial Sequence: Synthetic oligonucleotide
agacacggaagcagcatgaca

SEQ ID NO: 37573 - DNA, 21 bp, Artificial Sequence
  Description of Artificial Sequence: Synthetic oligonucleotide
agacacggaacacacccaagc

SEQ ID NO: 37574 - DNA, 21 bp, Artificial Sequence
  Description of Artificial Sequence: Synthetic oligonucleotide
agacaccacagcgcaccaaac

SEQ ID NO: 37575 - DNA, 21 bp, Artificial Sequence
  Description of Artificial Sequence: Synthetic oligonucleotide
agacacctcggaagcctccca

SEQ ID NO: 37576 - DNA, 21 bp, Artificial Sequence
  Description of Artificial Sequence: Synthetic oligonucleotide
agacacccagcagcacacgca

SEQ ID NO: 37577 - DNA, 21 bp, Artificial Sequence
  Description of Artificial Sequence: Synthetic oligonucleotide
agacacccagcaacaatcagc

SEQ ID NO: 37578 - DNA, 21 bp, Artificial Sequence
  Description of Artificial Sequence: Synthetic oligonucleotide
agacacccaatgctcacagga

SEQ ID NO: 37579 - DNA, 21 bp, Artificial Sequence
  Description of Artificial Sequence: Synthetic oligonucleotide
agacacccaccaaacagcttc

SEQ ID NO: 37580 - DNA, 21 bp, Artificial Sequence
  Description of Artificial Sequence: Synthetic oligonucleotide
agacacccaagcacaccaaac

SEQ ID NO: 37581 - DNA, 21 bp, Artificial Sequence
  Description of Artificial Sequence: Synthetic oligonucleotide
agacacccagtcacagaacca

SEQ ID NO: 37582 - DNA, 21 bp, Artificial Sequence
  Description of Artificial Sequence: Synthetic oligonucleotide
agacaccaaacaatcatcgca

SEQ ID NO: 37583 - DNA, 21 bp, Artificial Sequence
  Description of Artificial Sequence: Synthetic oligonucleotide
agacacagaccagcaccagaa

SEQ ID NO: 37584 - DNA, 21 bp, Artificial Sequence
  Description of Artificial Sequence: Synthetic oligonucleotide
agacacagcgaagtcacattc

SEQ ID NO: 37585 - DNA, 21 bp, Artificial Sequence
  Description of Artificial Sequence: Synthetic oligonucleotide
agacacagccacacaatcagc

SEQ ID NO: 37586 - DNA, 21 bp, Artificial Sequence
  Description of Artificial Sequence: Synthetic oligonucleotide
agacacagcctcagcctcgac

SEQ ID NO: 37587 - DNA, 21 bp, Artificial Sequence
  Description of Artificial Sequence: Synthetic oligonucleotide
agacacagcaaccaaacactc

SEQ ID NO: 37588 - DNA, 21 bp, Artificial Sequence
  Description of Artificial Sequence: Synthetic oligonucleotide
agacacagcccactcacagga

SEQ ID NO: 37589 - DNA, 21 bp, Artificial Sequence
  Description of Artificial Sequence: Synthetic oligonucleotide
agacacagccaaggaccattc

SEQ ID NO: 37590 - DNA, 21 bp, Artificial Sequence
  Description of Artificial Sequence: Synthetic oligonucleotide
agacacacaatggaaacaagc

SEQ ID NO: 37591 - DNA, 21 bp, Artificial Sequence
  Description of Artificial Sequence: Synthetic oligonucleotide
agacacacaccagaccaagga

SEQ ID NO: 37592 - DNA, 21 bp, Artificial Sequence
  Description of Artificial Sequence: Synthetic oligonucleotide
agaatcgcaccaacaggaaac

SEQ ID NO: 37593 - DNA, 21 bp, Artificial Sequence
  Description of Artificial Sequence: Synthetic oligonucleotide
agaatcgacgcagaactcgaa

SEQ ID NO: 37594 - DNA, 21 bp, Artificial Sequence
  Description of Artificial Sequence: Synthetic oligonucleotide
agaatcgacggaatcctcagc

SEQ ID NO: 37595 - DNA, 21 bp, Artificial Sequence
  Description of Artificial Sequence: Synthetic oligonucleotide
agaatcgaaaacgaagtcgtc

SEQ ID NO: 37596 - DNA, 21 bp, Artificial Sequence
  Description of Artificial Sequence: Synthetic oligonucleotide
agaatcggagaccacatcaga

SEQ ID NO: 37597 - DNA, 21 bp, Artificial Sequence
  Description of Artificial Sequence: Synthetic oligonucleotide
agaatcggaaaaaacgacagc

SEQ ID NO: 37598 - DNA, 21 bp, Artificial Sequence
  Description of Artificial Sequence: Synthetic oligonucleotide
agaatcggacaaaacctcgca

SEQ ID NO: 37599 - DNA, 21 bp, Artificial Sequence
  Description of Artificial Sequence: Synthetic oligonucleotide
agaatcggacaaacattcgca

SEQ ID NO: 37600 - DNA, 21 bp, Artificial Sequence
  Description of Artificial Sequence: Synthetic oligonucleotide
agaatcggaagcggaacagga

SEQ ID NO: 37601 - DNA, 21 bp, Artificial Sequence
  Description of Artificial Sequence: Synthetic oligonucleotide
agaatcggatggacaatcgac

SEQ ID NO: 37602 - DNA, 21 bp, Artificial Sequence
  Description of Artificial Sequence: Synthetic oligonucleotide
agaatccactacgaaggaatg

SEQ ID NO: 37603 - DNA, 21 bp, Artificial Sequence
  Description of Artificial Sequence: Synthetic oligonucleotide
agaatcaacatcgcagaaaca

SEQ ID NO: 37604 - DNA, 21 bp, Artificial Sequence
  Description of Artificial Sequence: Synthetic oligonucleotide
agaatcccagcactcagcgga

SEQ ID NO: 37605 - DNA, 21 bp, Artificial Sequence
  Description of Artificial Sequence: Synthetic oligonucleotide
agaatcccaacaagcccacca

SEQ ID NO: 37606 - DNA, 21 bp, Artificial Sequence
  Description of Artificial Sequence: Synthetic oligonucleotide
agaatcccagtcagagtcgac

SEQ ID NO: 37607 - DNA, 21 bp, Artificial Sequence
  Description of Artificial Sequence: Synthetic oligonucleotide
agaatcagatacccagaagga

SEQ ID NO: 37608 - DNA, 21 bp, Artificial Sequence
  Description of Artificial Sequence: Synthetic oligonucleotide
agaatcagcgcactccaacca

SEQ ID NO: 37609 - DNA, 21 bp, Artificial Sequence
  Description of Artificial Sequence: Synthetic oligonucleotide
agaatcagcgactacccacca

SEQ ID NO: 37610 - DNA, 21 bp, Artificial Sequence
  Description of Artificial Sequence: Synthetic oligonucleotide
agaatcagcggacacgcaagc

SEQ ID NO: 37611 - DNA, 21 bp, Artificial Sequence
  Description of Artificial Sequence: Synthetic oligonucleotide
agaatcagcccaacaccaatc

SEQ ID NO: 37612 - DNA, 21 bp, Artificial Sequence
  Description of Artificial Sequence: Synthetic oligonucleotide
agaatcagcagcggaatcgac

SEQ ID NO: 37613 - DNA, 21 bp, Artificial Sequence
  Description of Artificial Sequence: Synthetic oligonucleotide
agaatcagcagcagcccagac

SEQ ID NO: 37614 - DNA, 21 bp, Artificial Sequence
  Description of Artificial Sequence: Synthetic oligonucleotide
agaatctacgaccaaagcatc

SEQ ID NO: 37615 - DNA, 21 bp, Artificial Sequence
  Description of Artificial Sequence: Synthetic oligonucleotide
agaatctacagcccagacgga

SEQ ID NO: 37616 - DNA, 21 bp, Artificial Sequence
  Description of Artificial Sequence: Synthetic oligonucleotide
agaatctacacaacaagccca

SEQ ID NO: 37617 - DNA, 21 bp, Artificial Sequence
  Description of Artificial Sequence: Synthetic oligonucleotide
agaaaagacgacacaacatgg

SEQ ID NO: 37618 - DNA, 21 bp, Artificial Sequence
  Description of Artificial Sequence: Synthetic oligonucleotide
agaaaagacctcagctgggac

SEQ ID NO: 37619 - DNA, 21 bp, Artificial Sequence
  Description of Artificial Sequence: Synthetic oligonucleotide
agaaaagacagaagcccagaa

SEQ ID NO: 37620 - DNA, 21 bp, Artificial Sequence
  Description of Artificial Sequence: Synthetic oligonucleotide
agaaaagacacaccaatgcac

SEQ ID NO: 37621 - DNA, 21 bp, Artificial Sequence
  Description of Artificial Sequence: Synthetic oligonucleotide
agaaaagacacagtcccaaac

SEQ ID NO: 37622 - DNA, 21 bp, Artificial Sequence
  Description of Artificial Sequence: Synthetic oligonucleotide
agaaaaggactcgacgacgca

SEQ ID NO: 37623 - DNA, 21 bp, Artificial Sequence
  Description of Artificial Sequence: Synthetic oligonucleotide
agaaaactcccactcgtcgac

SEQ ID NO: 37624 - DNA, 21 bp, Artificial Sequence
  Description of Artificial Sequence: Synthetic oligonucleotide
agaaaaatgaaccaagaccaa

SEQ ID NO: 37625 - DNA, 21 bp, Artificial Sequence
  Description of Artificial Sequence: Synthetic oligonucleotide
agaaaaaactaccaactcgac

SEQ ID NO: 37626 - DNA, 21 bp, Artificial Sequence
  Description of Artificial Sequence: Synthetic oligonucleotide
agaaaaccactcacagcacca

SEQ ID NO: 37627 - DNA, 21 bp, Artificial Sequence
  Description of Artificial Sequence: Synthetic oligonucleotide
agaaaaagcccacaagaagca

SEQ ID NO: 37628 - DNA, 21 bp, Artificial Sequence
  Description of Artificial Sequence: Synthetic oligonucleotide
agaaaaagcacactcgacaca

SEQ ID NO: 37629 - DNA, 21 bp, Artificial Sequence
  Description of Artificial Sequence: Synthetic oligonucleotide
agaaaagtcgaaagcagaaga

SEQ ID NO: 37630 - DNA, 21 bp, Artificial Sequence
  Description of Artificial Sequence: Synthetic oligonucleotide
agaaaagtcacaccagacaca

SEQ ID NO: 37631 - DNA, 21 bp, Artificial Sequence
  Description of Artificial Sequence: Synthetic oligonucleotide
agactcgcagcagaaacactc

SEQ ID NO: 37632 - DNA, 21 bp, Artificial Sequence
  Description of Artificial Sequence: Synthetic oligonucleotide
agactcgcagcaaaccacctc

SEQ ID NO: 37633 - DNA, 21 bp, Artificial Sequence
  Description of Artificial Sequence: Synthetic oligonucleotide
agactcgcagaaacaagccac

SEQ ID NO: 37634 - DNA, 21 bp, Artificial Sequence
  Description of Artificial Sequence: Synthetic oligonucleotide
agactcgcactcgaaagcaac

SEQ ID NO: 37635 - DNA, 21 bp, Artificial Sequence
  Description of Artificial Sequence: Synthetic oligonucleotide
agactcgcaatgcaagcagca

SEQ ID NO: 37636 - DNA, 21 bp, Artificial Sequence
  Description of Artificial Sequence: Synthetic oligonucleotide
agactcgcacaaatcaacagc

SEQ ID NO: 37637 - DNA, 21 bp, Artificial Sequence
  Description of Artificial Sequence: Synthetic oligonucleotide
agactcgcaacagaagaccca

SEQ ID NO: 37638 - DNA, 21 bp, Artificial Sequence
  Description of Artificial Sequence: Synthetic oligonucleotide
agactcgacgcaaacagcaga

SEQ ID NO: 37639 - DNA, 21 bp, Artificial Sequence
  Description of Artificial Sequence: Synthetic oligonucleotide
agactcgacgacgtcggactc

SEQ ID NO: 37640 - DNA, 21 bp, Artificial Sequence
  Description of Artificial Sequence: Synthetic oligonucleotide
agactcgacttcgacacacca

SEQ ID NO: 37641 - DNA, 21 bp, Artificial Sequence
  Description of Artificial Sequence: Synthetic oligonucleotide
agactcgacatgagaatcgaa

SEQ ID NO: 37642 - DNA, 21 bp, Artificial Sequence
  Description of Artificial Sequence: Synthetic oligonucleotide
agactcgacccaggagaacca

SEQ ID NO: 37643 - DNA, 21 bp, Artificial Sequence
  Description of Artificial Sequence: Synthetic oligonucleotide
agactcgacccacacagcagc

SEQ ID NO: 37644 - DNA, 21 bp, Artificial Sequence
  Description of Artificial Sequence: Synthetic oligonucleotide
agactcgacagcctcgcactc

SEQ ID NO: 37645 - DNA, 21 bp, Artificial Sequence
  Description of Artificial Sequence: Synthetic oligonucleotide
agactcgacagcatgttcagc

SEQ ID NO: 37646 - DNA, 21 bp, Artificial Sequence
  Description of Artificial Sequence: Synthetic oligonucleotide
agactcgacacaacaatgcaa

SEQ ID NO: 37647 - DNA, 21 bp, Artificial Sequence
  Description of Artificial Sequence: Synthetic oligonucleotide
agactcgacacagtcagcagc

SEQ ID NO: 37648 - DNA, 21 bp, Artificial Sequence
  Description of Artificial Sequence: Synthetic oligonucleotide
agactcgaagcacaagtcgca

SEQ ID NO: 37649 - DNA, 21 bp, Artificial Sequence
  Description of Artificial Sequence: Synthetic oligonucleotide
agactcgaaccaatgcaaaac

SEQ ID NO: 37650 - DNA, 21 bp, Artificial Sequence
  Description of Artificial Sequence: Synthetic oligonucleotide
agactcgaaagcagcagacca

SEQ ID NO: 37651 - DNA, 21 bp, Artificial Sequence
  Description of Artificial Sequence: Synthetic oligonucleotide
agactcttcggagacgactac

SEQ ID NO: 37652 - DNA, 21 bp, Artificial Sequence
  Description of Artificial Sequence: Synthetic oligonucleotide
agactcggagacggagcagac

SEQ ID NO: 37653 - DNA, 21 bp, Artificial Sequence
  Description of Artificial Sequence: Synthetic oligonucleotide
agactcggagacgtctgggca

SEQ ID NO: 37654 - DNA, 21 bp, Artificial Sequence
  Description of Artificial Sequence: Synthetic oligonucleotide
agactcggaatggtcagcgaa

SEQ ID NO: 37655 - DNA, 21 bp, Artificial Sequence
  Description of Artificial Sequence: Synthetic oligonucleotide
agactcggaccaggataccca

SEQ ID NO: 37656 - DNA, 21 bp, Artificial Sequence
  Description of Artificial Sequence: Synthetic oligonucleotide
agactcggaccagtcagcgga

SEQ ID NO: 37657 - DNA, 21 bp, Artificial Sequence
  Description of Artificial Sequence: Synthetic oligonucleotide
agactcggaagccaaacaagc

SEQ ID NO: 37658 - DNA, 21 bp, Artificial Sequence
  Description of Artificial Sequence: Synthetic oligonucleotide
agactcggaacacacagcgaa

SEQ ID NO: 37659 - DNA, 21 bp, Artificial Sequence
  Description of Artificial Sequence: Synthetic oligonucleotide
agactcggaacatgggcagaa

SEQ ID NO: 37660 - DNA, 21 bp, Artificial Sequence
  Description of Artificial Sequence: Synthetic oligonucleotide
agactcggagtctgcccaagc

SEQ ID NO: 37661 - DNA, 21 bp, Artificial Sequence
  Description of Artificial Sequence: Synthetic oligonucleotide
agactccacatcggaagcgga

SEQ ID NO: 37662 - DNA, 21 bp, Artificial Sequence
  Description of Artificial Sequence: Synthetic oligonucleotide
agactccacatcaacagcgaa

SEQ ID NO: 37663 - DNA, 21 bp, Artificial Sequence
  Description of Artificial Sequence: Synthetic oligonucleotide
agactccacacagacctcgga

SEQ ID NO: 37664 - DNA, 21 bp, Artificial Sequence
  Description of Artificial Sequence: Synthetic oligonucleotide
agactcatccacagcggattc

SEQ ID NO: 37665 - DNA, 21 bp, Artificial Sequence
  Description of Artificial Sequence: Synthetic oligonucleotide
agactcatcaacaacagcgca

SEQ ID NO: 37666 - DNA, 21 bp, Artificial Sequence
  Description of Artificial Sequence: Synthetic oligonucleotide
agactcctcaaaacaccaagc

SEQ ID NO: 37667 - DNA, 21 bp, Artificial Sequence
  Description of Artificial Sequence: Synthetic oligonucleotide
agactcctcagcgcaacagga

SEQ ID NO: 37668 - DNA, 21 bp, Artificial Sequence
  Description of Artificial Sequence: Synthetic oligonucleotide
agactcatggacagagcagga

SEQ ID NO: 37669 - DNA, 21 bp, Artificial Sequence
  Description of Artificial Sequence: Synthetic oligonucleotide
agactcatgaacccaaaagga

SEQ ID NO: 37670 - DNA, 21 bp, Artificial Sequence
  Description of Artificial Sequence: Synthetic oligonucleotide
agactcaacgacctcacactc

SEQ ID NO: 37671 - DNA, 21 bp, Artificial Sequence
  Description of Artificial Sequence: Synthetic oligonucleotide
agactcaacctcagcacaaca

SEQ ID NO: 37672 - DNA, 21 bp, Artificial Sequence
  Description of Artificial Sequence: Synthetic oligonucleotide
agactcaacaacaacacactc

SEQ ID NO: 37673 - DNA, 21 bp, Artificial Sequence
  Description of Artificial Sequence: Synthetic oligonucleotide
agactcaaccaagtcccagca

SEQ ID NO: 37674 - DNA, 21 bp, Artificial Sequence
  Description of Artificial Sequence: Synthetic oligonucleotide
agactcaacacaagcatgatg

SEQ ID NO: 37675 - DNA, 21 bp, Artificial Sequence
  Description of Artificial Sequence: Synthetic oligonucleotide
agactcccagacccaagcagc

SEQ ID NO: 37676 - DNA, 21 bp, Artificial Sequence
  Description of Artificial Sequence: Synthetic oligonucleotide
agactcccaggaccagaaaga

SEQ ID NO: 37677 - DNA, 21 bp, Artificial Sequence
  Description of Artificial Sequence: Synthetic oligonucleotide
agactcccactcgaaaacctc

SEQ ID NO: 37678 - DNA, 21 bp, Artificial Sequence
  Description of Artificial Sequence: Synthetic oligonucleotide
agactcccactcagcgcacac

SEQ ID NO: 37679 - DNA, 21 bp, Artificial Sequence
  Description of Artificial Sequence: Synthetic oligonucleotide
agactcccaccaagcggaatc

SEQ ID NO: 37680 - DNA, 21 bp, Artificial Sequence
  Description of Artificial Sequence: Synthetic oligonucleotide
agactcccaccaacagacgtc

SEQ ID NO: 37681 - DNA, 21 bp, Artificial Sequence
  Description of Artificial Sequence: Synthetic oligonucleotide
agactcccacaaagagacatc

SEQ ID NO: 37682 - DNA, 21 bp, Artificial Sequence
  Description of Artificial Sequence: Synthetic oligonucleotide
agactcccaagcgaaaaacaa

SEQ ID NO: 37683 - DNA, 21 bp, Artificial Sequence
  Description of Artificial Sequence: Synthetic oligonucleotide
agactcccaagcctcgtcgac

SEQ ID NO: 37684 - DNA, 21 bp, Artificial Sequence
  Description of Artificial Sequence: Synthetic oligonucleotide
agactcccaacaagactcgac

SEQ ID NO: 37685 - DNA, 21 bp, Artificial Sequence
  Description of Artificial Sequence: Synthetic oligonucleotide
agactcccaacaagccacttc

SEQ ID NO: 37686 - DNA, 21 bp, Artificial Sequence
  Description of Artificial Sequence: Synthetic oligonucleotide
agactcccaacagtcacagga

SEQ ID NO: 37687 - DNA, 21 bp, Artificial Sequence
  Description of Artificial Sequence: Synthetic oligonucleotide
agactcccagtccaaccaagc

SEQ ID NO: 37688 - DNA, 21 bp, Artificial Sequence
  Description of Artificial Sequence: Synthetic oligonucleotide
agactccaagacaacggaagc

SEQ ID NO: 37689 - DNA, 21 bp, Artificial Sequence
  Description of Artificial Sequence: Synthetic oligonucleotide
agactccaaggattcccaaac

SEQ ID NO: 37690 - DNA, 21 bp, Artificial Sequence
  Description of Artificial Sequence: Synthetic oligonucleotide
agactccaactccaagaccac

SEQ ID NO: 37691 - DNA, 21 bp, Artificial Sequence
  Description of Artificial Sequence: Synthetic oligonucleotide
agactccaaaacacaggaaca

SEQ ID NO: 37692 - DNA, 21 bp, Artificial Sequence
  Description of Artificial Sequence: Synthetic oligonucleotide
agactccaaccagcagaagaa

SEQ ID NO: 37693 - DNA, 21 bp, Artificial Sequence
  Description of Artificial Sequence: Synthetic oligonucleotide
agactccaacaagtcggagtc

SEQ ID NO: 37694 - DNA, 21 bp, Artificial Sequence
  Description of Artificial Sequence: Synthetic oligonucleotide
agactccaaagcagcatcgaa

SEQ ID NO: 37695 - DNA, 21 bp, Artificial Sequence
  Description of Artificial Sequence: Synthetic oligonucleotide
agactcagaccaggactcgac

SEQ ID NO: 37696 - DNA, 21 bp, Artificial Sequence
  Description of Artificial Sequence: Synthetic oligonucleotide
agactcagcgcagacacacac

SEQ ID NO: 37697 - DNA, 21 bp, Artificial Sequence
  Description of Artificial Sequence: Synthetic oligonucleotide
agactcagccacgcaggagtc

SEQ ID NO: 37698 - DNA, 21 bp, Artificial Sequence
  Description of Artificial Sequence: Synthetic oligonucleotide
agactcagcatcggaagcgtc

SEQ ID NO: 37699 - DNA, 21 bp, Artificial Sequence
  Description of Artificial Sequence: Synthetic oligonucleotide
agactcagcctcgacagattc

SEQ ID NO: 37700 - DNA, 21 bp, Artificial Sequence
  Description of Artificial Sequence: Synthetic oligonucleotide
agactcagcctcccaagcaca

SEQ ID NO: 37701 - DNA, 21 bp, Artificial Sequence
  Description of Artificial Sequence: Synthetic oligonucleotide
agactcagcaacagcgaacca

SEQ ID NO: 37702 - DNA, 21 bp, Artificial Sequence
  Description of Artificial Sequence: Synthetic oligonucleotide
agactcagcccaccaccaagc

SEQ ID NO: 37703 - DNA, 21 bp, Artificial Sequence
  Description of Artificial Sequence: Synthetic oligonucleotide
agactcagcccacaaccagca

SEQ ID NO: 37704 - DNA, 21 bp, Artificial Sequence
  Description of Artificial Sequence: Synthetic oligonucleotide
agactcagccaaagcaacaac

SEQ ID NO: 37705 - DNA, 21 bp, Artificial Sequence
  Description of Artificial Sequence: Synthetic oligonucleotide
agactcagcagcggaccaatc

SEQ ID NO: 37706 - DNA, 21 bp, Artificial Sequence
  Description of Artificial Sequence: Synthetic oligonucleotide
agactcagcagcaacctcgaa

SEQ ID NO: 37707 - DNA, 21 bp, Artificial Sequence
  Description of Artificial Sequence: Synthetic oligonucleotide
agactcacagcaacaagcaac

SEQ ID NO: 37708 - DNA, 21 bp, Artificial Sequence
  Description of Artificial Sequence: Synthetic oligonucleotide
agactcacagacagaagcaca

SEQ ID NO: 37709 - DNA, 21 bp, Artificial Sequence
  Description of Artificial Sequence: Synthetic oligonucleotide
agactcacagaaccacacaga

SEQ ID NO: 37710 - DNA, 21 bp, Artificial Sequence
  Description of Artificial Sequence: Synthetic oligonucleotide
agactcacacacgaaagccca

SEQ ID NO: 37711 - DNA, 21 bp, Artificial Sequence
  Description of Artificial Sequence: Synthetic oligonucleotide
agactcacacacacaggacac

SEQ ID NO: 37712 - DNA, 21 bp, Artificial Sequence
  Description of Artificial Sequence: Synthetic oligonucleotide
agactcacaatggtcagagac

SEQ ID NO: 37713 - DNA, 21 bp, Artificial Sequence
  Description of Artificial Sequence: Synthetic oligonucleotide
agactcacaccagaaggacaa

SEQ ID NO: 37714 - DNA, 21 bp, Artificial Sequence
  Description of Artificial Sequence: Synthetic oligonucleotide
agactcgtcgacaacctccca

SEQ ID NO: 37715 - DNA, 21 bp, Artificial Sequence
  Description of Artificial Sequence: Synthetic oligonucleotide
agactcgtcaaccaaatgagc

SEQ ID NO: 37716 - DNA, 21 bp, Artificial Sequence
  Description of Artificial Sequence: Synthetic oligonucleotide
agactcgtccaagcattcgca

SEQ ID NO: 37717 - DNA, 21 bp, Artificial Sequence
  Description of Artificial Sequence: Synthetic oligonucleotide
agactctacagcggaatcgaa

SEQ ID NO: 37718 - DNA, 21 bp, Artificial Sequence
  Description of Artificial Sequence: Synthetic oligonucleotide
agactctacagcaacagccca

SEQ ID NO: 37719 - DNA, 21 bp, Artificial Sequence
  Description of Artificial Sequence: Synthetic oligonucleotide
agaatggcaaaagaaacaagc

SEQ ID NO: 37720 - DNA, 21 bp, Artificial Sequence
  Description of Artificial Sequence: Synthetic oligonucleotide
agaatggaaccaccaatcagc

SEQ ID NO: 37721 - DNA, 21 bp, Artificial Sequence
  Description of Artificial Sequence: Synthetic oligonucleotide
agaatggaaccaagcgcagtc

SEQ ID NO: 37722 - DNA, 21 bp, Artificial Sequence
  Description of Artificial Sequence: Synthetic oligonucleotide
agaatgggagcagcagtctac

SEQ ID NO: 37723 - DNA, 21 bp, Artificial Sequence
  Description of Artificial Sequence: Synthetic oligonucleotide
agaatgggagtccacccaaca

SEQ ID NO: 37724 - DNA, 21 bp, Artificial Sequence
  Description of Artificial Sequence: Synthetic oligonucleotide
agaatgggatacgtcgaagca

SEQ ID NO: 37725 - DNA, 21 bp, Artificial Sequence
  Description of Artificial Sequence: Synthetic oligonucleotide
agaatgcacgtcacagaagca

SEQ ID NO: 37726 - DNA, 21 bp, Artificial Sequence
  Description of Artificial Sequence: Synthetic oligonucleotide
agaatgatccaaagcggacac

SEQ ID NO: 37727 - DNA, 21 bp, Artificial Sequence
  Description of Artificial Sequence: Synthetic oligonucleotide
agaatgctcgcaccaagcgga

SEQ ID NO: 37728 - DNA, 21 bp, Artificial Sequence
  Description of Artificial Sequence: Synthetic oligonucleotide
agaatgctcgaccaactcaac

SEQ ID NO: 37729 - DNA, 21 bp, Artificial Sequence
  Description of Artificial Sequence: Synthetic oligonucleotide
agaatgctcccagacgtctac

SEQ ID NO: 37730 - DNA, 21 bp, Artificial Sequence
  Description of Artificial Sequence: Synthetic oligonucleotide
agaatgatgccagacctccca

SEQ ID NO: 37731 - DNA, 21 bp, Artificial Sequence
  Description of Artificial Sequence: Synthetic oligonucleotide
agaatgaacgaagcactcgga

SEQ ID NO: 37732 - DNA, 21 bp, Artificial Sequence
  Description of Artificial Sequence: Synthetic oligonucleotide
agaatgaacatccaagtcgga

SEQ ID NO: 37733 - DNA, 21 bp, Artificial Sequence
  Description of Artificial Sequence: Synthetic oligonucleotide
agaatgaactacggaacagaa

SEQ ID NO: 37734 - DNA, 21 bp, Artificial Sequence
  Description of Artificial Sequence: Synthetic oligonucleotide
agaatgccagcaatggcagtc

SEQ ID NO: 37735 - DNA, 21 bp, Artificial Sequence
  Description of Artificial Sequence: Synthetic oligonucleotide
agaatgccagcaagcaacgca

SEQ ID NO: 37736 - DNA, 21 bp, Artificial Sequence
  Description of Artificial Sequence: Synthetic oligonucleotide
agaatgccaagagaacaaagc

SEQ ID NO: 37737 - DNA, 21 bp, Artificial Sequence
  Description of Artificial Sequence: Synthetic oligonucleotide
agaatgcaaagcgcatacgtc

SEQ ID NO: 37738 - DNA, 21 bp, Artificial Sequence
  Description of Artificial Sequence: Synthetic oligonucleotide
agaatgcaaagccaaggattc

SEQ ID NO: 37739 - DNA, 21 bp, Artificial Sequence
  Description of Artificial Sequence: Synthetic oligonucleotide
agaatgagcgacagcttcgtc

SEQ ID NO: 37740 - DNA, 21 bp, Artificial Sequence
  Description of Artificial Sequence: Synthetic oligonucleotide
agaatgagcgaagtcacaatc

SEQ ID NO: 37741 - DNA, 21 bp, Artificial Sequence
  Description of Artificial Sequence: Synthetic oligonucleotide
agaatgagcatcccaaacgac

SEQ ID NO: 37742 - DNA, 21 bp, Artificial Sequence
  Description of Artificial Sequence: Synthetic oligonucleotide
agaatgagcctcgcaagcgaa

SEQ ID NO: 37743 - DNA, 21 bp, Artificial Sequence
  Description of Artificial Sequence: Synthetic oligonucleotide
agaatgagcaacagcccacaa

SEQ ID NO: 37744 - DNA, 21 bp, Artificial Sequence
  Description of Artificial Sequence: Synthetic oligonucleotide
agaatgagcagcgacctccca

SEQ ID NO: 37745 - DNA, 21 bp, Artificial Sequence
  Description of Artificial Sequence: Synthetic oligonucleotide
agaatgacagcagcaatctgc

SEQ ID NO: 37746 - DNA, 21 bp, Artificial Sequence
  Description of Artificial Sequence: Synthetic oligonucleotide
agaatgacacacacagcacca

SEQ ID NO: 37747 - DNA, 21 bp, Artificial Sequence
  Description of Artificial Sequence: Synthetic oligonucleotide
agaatgacaatcggaacaaca

SEQ ID NO: 37748 - DNA, 21 bp, Artificial Sequence
  Description of Artificial Sequence: Synthetic oligonucleotide
agaatggtcggaggaggagac

SEQ ID NO: 37749 - DNA, 21 bp, Artificial Sequence
  Description of Artificial Sequence: Synthetic oligonucleotide
agaatggtcaacctcggacac

SEQ ID NO: 37750 - DNA, 21 bp, Artificial Sequence
  Description of Artificial Sequence: Synthetic oligonucleotide
agaatggtcagcagcagcgca

SEQ ID NO: 37751 - DNA, 21 bp, Artificial Sequence
  Description of Artificial Sequence: Synthetic oligonucleotide
agaatgtacggaagcagcagc

SEQ ID NO: 37752 - DNA, 21 bp, Artificial Sequence
  Description of Artificial Sequence: Synthetic oligonucleotide
agaaacgcagcagtcgaccca

SEQ ID NO: 37753 - DNA, 21 bp, Artificial Sequence
  Description of Artificial Sequence: Synthetic oligonucleotide
agaaacgcaggagaaacacac

SEQ ID NO: 37754 - DNA, 21 bp, Artificial Sequence
  Description of Artificial Sequence: Synthetic oligonucleotide
agaaacgcaggaacagacaga

SEQ ID NO: 37755 - DNA, 21 bp, Artificial Sequence
  Description of Artificial Sequence: Synthetic oligonucleotide
agaaacgcaaacatgccaaca

SEQ ID NO: 37756 - DNA, 21 bp, Artificial Sequence
  Description of Artificial Sequence: Synthetic oligonucleotide
agaaacgcaccaagcgcagac

SEQ ID NO: 37757 - DNA, 21 bp, Artificial Sequence
  Description of Artificial Sequence: Synthetic oligonucleotide
agaaacgcaacagcaatggtc

SEQ ID NO: 37758 - DNA, 21 bp, Artificial Sequence
  Description of Artificial Sequence: Synthetic oligonucleotide
agaaacgacctcacaggagtc

SEQ ID NO: 37759 - DNA, 21 bp, Artificial Sequence
  Description of Artificial Sequence: Synthetic oligonucleotide
agaaacgacatggtccaaagc

SEQ ID NO: 37760 - DNA, 21 bp, Artificial Sequence
  Description of Artificial Sequence: Synthetic oligonucleotide
agaaacgacaacagagtcaca

SEQ ID NO: 37761 - DNA, 21 bp, Artificial Sequence
  Description of Artificial Sequence: Synthetic oligonucleotide
agaaacgacagaagcttcgca

SEQ ID NO: 37762 - DNA, 21 bp, Artificial Sequence
  Description of Artificial Sequence: Synthetic oligonucleotide
agaaacgacacaagcgacctc

SEQ ID NO: 37763 - DNA, 21 bp, Artificial Sequence
  Description of Artificial Sequence: Synthetic oligonucleotide
agaaacgacgtcagcgacatc

SEQ ID NO: 37764 - DNA, 21 bp, Artificial Sequence
  Description of Artificial Sequence: Synthetic oligonucleotide
agaaacgaacaccacctccca

SEQ ID NO: 37765 - DNA, 21 bp, Artificial Sequence
  Description of Artificial Sequence: Synthetic oligonucleotide
agaaacgaaccaaacggagga

SEQ ID NO: 37766 - DNA, 21 bp, Artificial Sequence
  Description of Artificial Sequence: Synthetic oligonucleotide
agaaacttcgcagacagcatg

SEQ ID NO: 37767 - DNA, 21 bp, Artificial Sequence
  Description of Artificial Sequence: Synthetic oligonucleotide
agaaacttcacaggaccagaa

SEQ ID NO: 37768 - DNA, 21 bp, Artificial Sequence
  Description of Artificial Sequence: Synthetic oligonucleotide
agaaacggagcaatccaagca

SEQ ID NO: 37769 - DNA, 21 bp, Artificial Sequence
  Description of Artificial Sequence: Synthetic oligonucleotide
agaaacggaagagacgcagga

SEQ ID NO: 37770 - DNA, 21 bp, Artificial Sequence
  Description of Artificial Sequence: Synthetic oligonucleotide
agaaacggagtcacagcagca

SEQ ID NO: 37771 - DNA, 21 bp, Artificial Sequence
  Description of Artificial Sequence: Synthetic oligonucleotide
agaaaccacggattcgcagaa

SEQ ID NO: 37772 - DNA, 21 bp, Artificial Sequence
  Description of Artificial Sequence: Synthetic oligonucleotide
agaaacatcgacgacgcaaac

SEQ ID NO: 37773 - DNA, 21 bp, Artificial Sequence
  Description of Artificial Sequence: Synthetic oligonucleotide
agaaacaaagaaaacgtcgga

SEQ ID NO: 37774 - DNA, 21 bp, Artificial Sequence
  Description of Artificial Sequence: Synthetic oligonucleotide
agaaacctcccaccaagagac

SEQ ID NO: 37775 - DNA, 21 bp, Artificial Sequence
  Description of Artificial Sequence: Synthetic oligonucleotide
agaaacctcacaatcccagaa

SEQ ID NO: 37776 - DNA, 21 bp, Artificial Sequence
  Description of Artificial Sequence: Synthetic oligonucleotide
agaaacatggcactcacaagc

SEQ ID NO: 37777 - DNA, 21 bp, Artificial Sequence
  Description of Artificial Sequence: Synthetic oligonucleotide
agaaacaacgcactcccagac

SEQ ID NO: 37778 - DNA, 21 bp, Artificial Sequence
  Description of Artificial Sequence: Synthetic oligonucleotide
agaaacaacagccacggattc

SEQ ID NO: 37779 - DNA, 21 bp, Artificial Sequence
  Description of Artificial Sequence: Synthetic oligonucleotide
agaaacccagacatgcaccac

SEQ ID NO: 37780 - DNA, 21 bp, Artificial Sequence
  Description of Artificial Sequence: Synthetic oligonucleotide
agaaacccactcagcgcacaa

SEQ ID NO: 37781 - DNA, 21 bp, Artificial Sequence
  Description of Artificial Sequence: Synthetic oligonucleotide
agaaaccaaggactcctcgca

SEQ ID NO: 37782 - DNA, 21 bp, Artificial Sequence
  Description of Artificial Sequence: Synthetic oligonucleotide
agaaaccaaacaagcacaagc

SEQ ID NO: 37783 - DNA, 21 bp, Artificial Sequence
  Description of Artificial Sequence: Synthetic oligonucleotide
agaaacagagacccacaattc

SEQ ID NO: 37784 - DNA, 21 bp, Artificial Sequence
  Description of Artificial Sequence: Synthetic oligonucleotide
agaaacagcgcagcactccaa

SEQ ID NO: 37785 - DNA, 21 bp, Artificial Sequence
  Description of Artificial Sequence: Synthetic oligonucleotide
agaaacagcgactacagcgtc

SEQ ID NO: 37786 - DNA, 21 bp, Artificial Sequence
  Description of Artificial Sequence: Synthetic oligonucleotide
agaaacagcctcggattcgga

SEQ ID NO: 37787 - DNA, 21 bp, Artificial Sequence
  Description of Artificial Sequence: Synthetic oligonucleotide
agaaacagccaagtcccaatc

SEQ ID NO: 37788 - DNA, 21 bp, Artificial Sequence
  Description of Artificial Sequence: Synthetic oligonucleotide
agaaacagcagcagcctcgga

SEQ ID NO: 37789 - DNA, 21 bp, Artificial Sequence
  Description of Artificial Sequence: Synthetic oligonucleotide
agaaacagcacaagcatgaca

SEQ ID NO: 37790 - DNA, 21 bp, Artificial Sequence
  Description of Artificial Sequence: Synthetic oligonucleotide
agaaacagcgtcacaacacca

SEQ ID NO: 37791 - DNA, 21 bp, Artificial Sequence
  Description of Artificial Sequence: Synthetic oligonucleotide
agaaacagctacccaagcgac

SEQ ID NO: 37792 - DNA, 21 bp, Artificial Sequence
  Description of Artificial Sequence: Synthetic oligonucleotide
agaaacacagacgtcgacagc

SEQ ID NO: 37793 - DNA, 21 bp, Artificial Sequence
  Description of Artificial Sequence: Synthetic oligonucleotide
agaaacacactcctcatggac

SEQ ID NO: 37794 - DNA, 21 bp, Artificial Sequence
  Description of Artificial Sequence: Synthetic oligonucleotide
agaaacacactcgtcatccca

SEQ ID NO: 37795 - DNA, 21 bp, Artificial Sequence
  Description of Artificial Sequence: Synthetic oligonucleotide
agaaacacaccaaacagagac

SEQ ID NO: 37796 - DNA, 21 bp, Artificial Sequence
  Description of Artificial Sequence: Synthetic oligonucleotide
agaaacacaagccaactcgac

SEQ ID NO: 37797 - DNA, 21 bp, Artificial Sequence
  Description of Artificial Sequence: Synthetic oligonucleotide
agaaacgtcgaaacagcagga

SEQ ID NO: 37798 - DNA, 21 bp, Artificial Sequence
  Description of Artificial Sequence: Synthetic oligonucleotide
agaaacgtcggacacggagac

SEQ ID NO: 37799 - DNA, 21 bp, Artificial Sequence
  Description of Artificial Sequence: Synthetic oligonucleotide
agaaacgtcggaccaccaaca

SEQ ID NO: 37800 - DNA, 21 bp, Artificial Sequence
  Description of Artificial Sequence: Synthetic oligonucleotide
agaaacgtcccagaacacaga

SEQ ID NO: 37801 - DNA, 21 bp, Artificial Sequence
  Description of Artificial Sequence: Synthetic oligonucleotide
agaaacgtccaattcagccca

SEQ ID NO: 37802 - DNA, 21 bp, Artificial Sequence
  Description of Artificial Sequence: Synthetic oligonucleotide
agaaacgtcagagacacacca

SEQ ID NO: 37803 - DNA, 21 bp, Artificial Sequence
  Description of Artificial Sequence: Synthetic oligonucleotide
agaaacgtcagcgacagcagc

SEQ ID NO: 37804 - DNA, 21 bp, Artificial Sequence
  Description of Artificial Sequence: Synthetic oligonucleotide
agaaactacgcaggaaaagac

SEQ ID NO: 37805 - DNA, 21 bp, Artificial Sequence
  Description of Artificial Sequence: Synthetic oligonucleotide
agaccagcagcagtcagcaac

SEQ ID NO: 37806 - DNA, 21 bp, Artificial Sequence
  Description of Artificial Sequence: Synthetic oligonucleotide
agaccagcagacaaatgcaca

SEQ ID NO: 37807 - DNA, 21 bp, Artificial Sequence
  Description of Artificial Sequence: Synthetic oligonucleotide
agaccagcaaaactcgaactc

SEQ ID NO: 37808 - DNA, 21 bp, Artificial Sequence
  Description of Artificial Sequence: Synthetic oligonucleotide
agaccagcaatgctcgcaaca

SEQ ID NO: 37809 - DNA, 21 bp, Artificial Sequence
  Description of Artificial Sequence: Synthetic oligonucleotide
agaccagcaagcggacacgtc

SEQ ID NO: 37810 - DNA, 21 bp, Artificial Sequence
  Description of Artificial Sequence: Synthetic oligonucleotide
agaccagcaacagtcggagca

SEQ ID NO: 37811 - DNA, 21 bp, Artificial Sequence
  Description of Artificial Sequence: Synthetic oligonucleotide
agaccagcagtcatgaaagga

SEQ ID NO: 37812 - DNA, 21 bp, Artificial Sequence
  Description of Artificial Sequence: Synthetic oligonucleotide
agaccagacgcaagcgaaagc

SEQ ID NO: 37813 - DNA, 21 bp, Artificial Sequence
  Description of Artificial Sequence: Synthetic oligonucleotide
agaccagacgacccagcaaac

SEQ ID NO: 37814 - DNA, 21 bp, Artificial Sequence
  Description of Artificial Sequence: Synthetic oligonucleotide
agaccagacggaatggcaagc

SEQ ID NO: 37815 - DNA, 21 bp, Artificial Sequence
  Description of Artificial Sequence: Synthetic oligonucleotide
agaccagaccacagcaacgtc

SEQ ID NO: 37816 - DNA, 21 bp, Artificial Sequence
  Description of Artificial Sequence: Synthetic oligonucleotide
agaccagacaacagcaaagca

SEQ ID NO: 37817 - DNA, 21 bp, Artificial Sequence
  Description of Artificial Sequence: Synthetic oligonucleotide
agaccagacagcctcaaactc

SEQ ID NO: 37818 - DNA, 21 bp, Artificial Sequence
  Description of Artificial Sequence: Synthetic oligonucleotide
agaccagacagcccattcaca

SEQ ID NO: 37819 - DNA, 21 bp, Artificial Sequence
  Description of Artificial Sequence: Synthetic oligonucleotide
agaccagacacaagagcagca

SEQ ID NO: 37820 - DNA, 21 bp, Artificial Sequence
  Description of Artificial Sequence: Synthetic oligonucleotide
agaccagaagaagcaacaagc

SEQ ID NO: 37821 - DNA, 21 bp, Artificial Sequence
  Description of Artificial Sequence: Synthetic oligonucleotide
agaccagaaggaagcatggga

SEQ ID NO: 37822 - DNA, 21 bp, Artificial Sequence
  Description of Artificial Sequence: Synthetic oligonucleotide
agaccagaactcggactcctc

SEQ ID NO: 37823 - DNA, 21 bp, Artificial Sequence
  Description of Artificial Sequence: Synthetic oligonucleotide
agaccagaactcaaacaaagc

SEQ ID NO: 37824 - DNA, 21 bp, Artificial Sequence
  Description of Artificial Sequence: Synthetic oligonucleotide
agaccagaactcagcagcaga

SEQ ID NO: 37825 - DNA, 21 bp, Artificial Sequence
  Description of Artificial Sequence: Synthetic oligonucleotide
agaccagaaagcgtctacgga

SEQ ID NO: 37826 - DNA, 21 bp, Artificial Sequence
  Description of Artificial Sequence: Synthetic oligonucleotide
agaccattcgcaccacaagaa

SEQ ID NO: 37827 - DNA, 21 bp, Artificial Sequence
  Description of Artificial Sequence: Synthetic oligonucleotide
agaccattcagcccaacacca

SEQ ID NO: 37828 - DNA, 21 bp, Artificial Sequence
  Description of Artificial Sequence: Synthetic oligonucleotide
agaccaggagcagacgcaaga

SEQ ID NO: 37829 - DNA, 21 bp, Artificial Sequence
  Description of Artificial Sequence: Synthetic oligonucleotide
agaccaggaggaggaacagaa

SEQ ID NO: 37830 - DNA, 21 bp, Artificial Sequence
  Description of Artificial Sequence: Synthetic oligonucleotide
agaccaggactcagcacactc

SEQ ID NO: 37831 - DNA, 21 bp, Artificial Sequence
  Description of Artificial Sequence: Synthetic oligonucleotide
agaccaggaaacacactccca

SEQ ID NO: 37832 - DNA, 21 bp, Artificial Sequence
  Description of Artificial Sequence: Synthetic oligonucleotide
agaccaggaagagaaccactc

SEQ ID NO: 37833 - DNA, 21 bp, Artificial Sequence
  Description of Artificial Sequence: Synthetic oligonucleotide
agaccaggaagcagcacagaa

SEQ ID NO: 37834 - DNA, 21 bp, Artificial Sequence
  Description of Artificial Sequence: Synthetic oligonucleotide
agaccaggaacaagcacagtc

SEQ ID NO: 37835 - DNA, 21 bp, Artificial Sequence
  Description of Artificial Sequence: Synthetic oligonucleotide
agaccacacagcgacaaattc

SEQ ID NO: 37836 - DNA, 21 bp, Artificial Sequence
  Description of Artificial Sequence: Synthetic oligonucleotide
agaccaatcgcaagcacaaac

SEQ ID NO: 37837 - DNA, 21 bp, Artificial Sequence
  Description of Artificial Sequence: Synthetic oligonucleotide
agaccaaaagaaagcagcgtc

SEQ ID NO: 37838 - DNA, 21 bp, Artificial Sequence
  Description of Artificial Sequence: Synthetic oligonucleotide
agaccactcgacgcaccagac

SEQ ID NO: 37839 - DNA, 21 bp, Artificial Sequence
  Description of Artificial Sequence: Synthetic oligonucleotide
agaccactcgaccaagaaagc

SEQ ID NO: 37840 - DNA, 21 bp, Artificial Sequence
  Description of Artificial Sequence: Synthetic oligonucleotide
agaccactcgaaagcagagac

SEQ ID NO: 37841 - DNA, 21 bp, Artificial Sequence
  Description of Artificial Sequence: Synthetic oligonucleotide
agaccactcggaccacacatc

SEQ ID NO: 37842 - DNA, 21 bp, Artificial Sequence
  Description of Artificial Sequence: Synthetic oligonucleotide
agaccactcggaccaaacgac

SEQ ID NO: 37843 - DNA, 21 bp, Artificial Sequence
  Description of Artificial Sequence: Synthetic oligonucleotide
agaccactcggaagcgacaca

SEQ ID NO: 37844 - DNA, 21 bp, Artificial Sequence
  Description of Artificial Sequence: Synthetic oligonucleotide
agaccactcatcccaaacaac

SEQ ID NO: 37845 - DNA, 21 bp, Artificial Sequence
  Description of Artificial Sequence: Synthetic oligonucleotide
agaccactcaaacacgaccca

SEQ ID NO: 37846 - DNA, 21 bp, Artificial Sequence
  Description of Artificial Sequence: Synthetic oligonucleotide
agaccactcacagaatacgtc

SEQ ID NO: 37847 - DNA, 21 bp, Artificial Sequence
  Description of Artificial Sequence: Synthetic oligonucleotide
agaccactcgtcatgggagtc

SEQ ID NO: 37848 - DNA, 21 bp, Artificial Sequence
  Description of Artificial Sequence: Synthetic oligonucleotide
agaccaatggcaacactcagc

SEQ ID NO: 37849 - DNA, 21 bp, Artificial Sequence
  Description of Artificial Sequence: Synthetic oligonucleotide
agaccaatgatcacaagcgca

SEQ ID NO: 37850 - DNA, 21 bp, Artificial Sequence
  Description of Artificial Sequence: Synthetic oligonucleotide
agaccaatgaacctcaaagaa

SEQ ID NO: 37851 - DNA, 21 bp, Artificial Sequence
  Description of Artificial Sequence: Synthetic oligonucleotide
agaccaatgccaaacagccca

SEQ ID NO: 37852 - DNA, 21 bp, Artificial Sequence
  Description of Artificial Sequence: Synthetic oligonucleotide
agaccaatgagcctcgaaagc

SEQ ID NO: 37853 - DNA, 21 bp, Artificial Sequence
  Description of Artificial Sequence: Synthetic oligonucleotide
agaccaatgacaccacaactc

SEQ ID NO: 37854 - DNA, 21 bp, Artificial Sequence
  Description of Artificial Sequence: Synthetic oligonucleotide
agaccaaacgcagtcacagtc

SEQ ID NO: 37855 - DNA, 21 bp, Artificial Sequence
  Description of Artificial Sequence: Synthetic oligonucleotide
agaccaccagaaatccacttc

SEQ ID NO: 37856 - DNA, 21 bp, Artificial Sequence
  Description of Artificial Sequence: Synthetic oligonucleotide
agaccaccaggaccaatgagc

SEQ ID NO: 37857 - DNA, 21 bp, Artificial Sequence
  Description of Artificial Sequence: Synthetic oligonucleotide
agaccaccactcggagaagga

SEQ ID NO: 37858 - DNA, 21 bp, Artificial Sequence
  Description of Artificial Sequence: Synthetic oligonucleotide
agaccaccaaacgcaacacca

SEQ ID NO: 37859 - DNA, 21 bp, Artificial Sequence
  Description of Artificial Sequence: Synthetic oligonucleotide
agaccaccaaacggagacatg

SEQ ID NO: 37860 - DNA, 21 bp, Artificial Sequence
  Description of Artificial Sequence: Synthetic oligonucleotide
agaccaccaagcacagtcaac

SEQ ID NO: 37861 - DNA, 21 bp, Artificial Sequence
  Description of Artificial Sequence: Synthetic oligonucleotide
agaccaccaagcgtccaacca

SEQ ID NO: 37862 - DNA, 21 bp, Artificial Sequence
  Description of Artificial Sequence: Synthetic oligonucleotide
agaccaccagtccaaacagga

SEQ ID NO: 37863 - DNA, 21 bp, Artificial Sequence
  Description of Artificial Sequence: Synthetic oligonucleotide
agaccacaacacatcatgcca

SEQ ID NO: 37864 - DNA, 21 bp, Artificial Sequence
  Description of Artificial Sequence: Synthetic oligonucleotide
agaccacaaaaagcaagcgaa

SEQ ID NO: 37865 - DNA, 21 bp, Artificial Sequence
  Description of Artificial Sequence: Synthetic oligonucleotide
agaccacaaccaacaccatgc

SEQ ID NO: 37866 - DNA, 21 bp, Artificial Sequence
  Description of Artificial Sequence: Synthetic oligonucleotide
agaccaagagaaatcagccca

SEQ ID NO: 37867 - DNA, 21 bp, Artificial Sequence
  Description of Artificial Sequence: Synthetic oligonucleotide
agaccaagattcgcaagcgac

SEQ ID NO: 37868 - DNA, 21 bp, Artificial Sequence
  Description of Artificial Sequence: Synthetic oligonucleotide
agaccaagcgcagcaacacca

SEQ ID NO: 37869 - DNA, 21 bp, Artificial Sequence
  Description of Artificial Sequence: Synthetic oligonucleotide
agaccaagcgacctcaaaaac

SEQ ID NO: 37870 - DNA, 21 bp, Artificial Sequence
  Description of Artificial Sequence: Synthetic oligonucleotide
agaccaagcggaatggcacac

SEQ ID NO: 37871 - DNA, 21 bp, Artificial Sequence
  Description of Artificial Sequence: Synthetic oligonucleotide
agaccaagcctcgcagtcgga

SEQ ID NO: 37872 - DNA, 21 bp, Artificial Sequence
  Description of Artificial Sequence: Synthetic oligonucleotide
agaccaagcctcccagacttc

SEQ ID NO: 37873 - DNA, 21 bp, Artificial Sequence
  Description of Artificial Sequence: Synthetic oligonucleotide
agaccaagcctcagcggaaca

SEQ ID NO: 37874 - DNA, 21 bp, Artificial Sequence
  Description of Artificial Sequence: Synthetic oligonucleotide
agaccaagcctcagcccaaca

SEQ ID NO: 37875 - DNA, 21 bp, Artificial Sequence
  Description of Artificial Sequence: Synthetic oligonucleotide
agaccaagcaacgcaatggca

SEQ ID NO: 37876 - DNA, 21 bp, Artificial Sequence
  Description of Artificial Sequence: Synthetic oligonucleotide
agaccaagcaaccaaagcagc

SEQ ID NO: 37877 - DNA, 21 bp, Artificial Sequence
  Description of Artificial Sequence: Synthetic oligonucleotide
agaccaagcacagacagctac

SEQ ID NO: 37878 - DNA, 21 bp, Artificial Sequence
  Description of Artificial Sequence: Synthetic oligonucleotide
agaccaagcacatacccaagc

SEQ ID NO: 37879 - DNA, 21 bp, Artificial Sequence
  Description of Artificial Sequence: Synthetic oligonucleotide
agaccaagcgtcaacgaacac

SEQ ID NO: 37880 - DNA, 21 bp, Artificial Sequence
  Description of Artificial Sequence: Synthetic oligonucleotide
agaccaacactcccaatggca

SEQ ID NO: 37881 - DNA, 21 bp, Artificial Sequence
  Description of Artificial Sequence: Synthetic oligonucleotide
agaccaacacaaatcctcgga

SEQ ID NO: 37882 - DNA, 21 bp, Artificial Sequence
  Description of Artificial Sequence: Synthetic oligonucleotide
agaccaacaagcccaccagca

SEQ ID NO: 37883 - DNA, 21 bp, Artificial Sequence
  Description of Artificial Sequence: Synthetic oligonucleotide
agaccaacaagcacaacaagc

SEQ ID NO: 37884 - DNA, 21 bp, Artificial Sequence
  Description of Artificial Sequence: Synthetic oligonucleotide
agaccaacaacaagcaacgga

SEQ ID NO: 37885 - DNA, 21 bp, Artificial Sequence
  Description of Artificial Sequence: Synthetic oligonucleotide
agaccaacaacaacacaagaa

SEQ ID NO: 37886 - DNA, 21 bp, Artificial Sequence
  Description of Artificial Sequence: Synthetic oligonucleotide
agaccaacaacaacaagcgtc

SEQ ID NO: 37887 - DNA, 21 bp, Artificial Sequence
  Description of Artificial Sequence: Synthetic oligonucleotide
agaccagtctgcgacggaaca

SEQ ID NO: 37888 - DNA, 21 bp, Artificial Sequence
  Description of Artificial Sequence: Synthetic oligonucleotide
agaccagtcgactgggacctc

SEQ ID NO: 37889 - DNA, 21 bp, Artificial Sequence
  Description of Artificial Sequence: Synthetic oligonucleotide
agaccagtcaaagaatacgtc

SEQ ID NO: 37890 - DNA, 21 bp, Artificial Sequence
  Description of Artificial Sequence: Synthetic oligonucleotide
agaccagtcctcagcacagga

SEQ ID NO: 37891 - DNA, 21 bp, Artificial Sequence
  Description of Artificial Sequence: Synthetic oligonucleotide
agaccagtcccagaccaaatc

SEQ ID NO: 37892 - DNA, 21 bp, Artificial Sequence
  Description of Artificial Sequence: Synthetic oligonucleotide
agaccatacccaccaccaatc

SEQ ID NO: 37893 - DNA, 21 bp, Artificial Sequence
  Description of Artificial Sequence: Synthetic oligonucleotide
agacaagcactcatcagcgga

SEQ ID NO: 37894 - DNA, 21 bp, Artificial Sequence
  Description of Artificial Sequence: Synthetic oligonucleotide
agacaagacgcagcaatcagc

SEQ ID NO: 37895 - DNA, 21 bp, Artificial Sequence
  Description of Artificial Sequence: Synthetic oligonucleotide
agacaagacgaccacaaaatc

SEQ ID NO: 37896 - DNA, 21 bp, Artificial Sequence
  Description of Artificial Sequence: Synthetic oligonucleotide
agacaattcacagaaaacgca

SEQ ID NO: 37897 - DNA, 21 bp, Artificial Sequence
  Description of Artificial Sequence: Synthetic oligonucleotide
agacaaggagtcacaccaaca

SEQ ID NO: 37898 - DNA, 21 bp, Artificial Sequence
  Description of Artificial Sequence: Synthetic oligonucleotide
agacaacaccaactcccacac

SEQ ID NO: 37899 - DNA, 21 bp, Artificial Sequence
  Description of Artificial Sequence: Synthetic oligonucleotide
agacaaatcccacacacagaa

SEQ ID NO: 37900 - DNA, 21 bp, Artificial Sequence
  Description of Artificial Sequence: Synthetic oligonucleotide
agacaaaaagaacacaacctc

SEQ ID NO: 37901 - DNA, 21 bp, Artificial Sequence
  Description of Artificial Sequence: Synthetic oligonucleotide
agacaactcgaagcagaccca

SEQ ID NO: 37902 - DNA, 21 bp, Artificial Sequence
  Description of Artificial Sequence: Synthetic oligonucleotide
agacaaaacgacgtctgcagc

SEQ ID NO: 37903 - DNA, 21 bp, Artificial Sequence
  Description of Artificial Sequence: Synthetic oligonucleotide
agacaaaaccacatgccagca

SEQ ID NO: 37904 - DNA, 21 bp, Artificial Sequence
  Description of Artificial Sequence: Synthetic oligonucleotide
agacaaaacagatgcatcgac

SEQ ID NO: 37905 - DNA, 21 bp, Artificial Sequence
  Description of Artificial Sequence: Synthetic oligonucleotide
agacaaccactctacacagac

SEQ ID NO: 37906 - DNA, 21 bp, Artificial Sequence
  Description of Artificial Sequence: Synthetic oligonucleotide
agacaaccaccaaaactcgca

SEQ ID NO: 37907 - DNA, 21 bp, Artificial Sequence
  Description of Artificial Sequence: Synthetic oligonucleotide
agacaacaagcacacctcgtc

SEQ ID NO: 37908 - DNA, 21 bp, Artificial Sequence
  Description of Artificial Sequence: Synthetic oligonucleotide
agacaaagcgacctctacagc

SEQ ID NO: 37909 - DNA, 21 bp, Artificial Sequence
  Description of Artificial Sequence: Synthetic oligonucleotide
agacaaagcaacttcgcaaca

SEQ ID NO: 37910 - DNA, 21 bp, Artificial Sequence
  Description of Artificial Sequence: Synthetic oligonucleotide
agacaaagcaacacactcaac

SEQ ID NO: 37911 - DNA, 21 bp, Artificial Sequence
  Description of Artificial Sequence: Synthetic oligonucleotide
agacaaagccaatgcccaatg

SEQ ID NO: 37912 - DNA, 21 bp, Artificial Sequence
  Description of Artificial Sequence: Synthetic oligonucleotide
agacaaagcagctacgacgtc

SEQ ID NO: 37913 - DNA, 21 bp, Artificial Sequence
  Description of Artificial Sequence: Synthetic oligonucleotide
agacaaagcacacaactcctc

SEQ ID NO: 37914 - DNA, 21 bp, Artificial Sequence
  Description of Artificial Sequence: Synthetic oligonucleotide
agacaaagcgtcccaacaagc

SEQ ID NO: 37915 - DNA, 21 bp, Artificial Sequence
  Description of Artificial Sequence: Synthetic oligonucleotide
agacaaagcgtcagcaacctc

SEQ ID NO: 37916 - DNA, 21 bp, Artificial Sequence
  Description of Artificial Sequence: Synthetic oligonucleotide
agacaaacacacacactccaa

SEQ ID NO: 37917 - DNA, 21 bp, Artificial Sequence
  Description of Artificial Sequence: Synthetic oligonucleotide
agacaaacacaacaaatgtac

SEQ ID NO: 37918 - DNA, 21 bp, Artificial Sequence
  Description of Artificial Sequence: Synthetic oligonucleotide
agacaagtcgaaacaatgagc

SEQ ID NO: 37919 - DNA, 21 bp, Artificial Sequence
  Description of Artificial Sequence: Synthetic oligonucleotide
agacaagtcggaatgctcagc

SEQ ID NO: 37920 - DNA, 21 bp, Artificial Sequence
  Description of Artificial Sequence: Synthetic oligonucleotide
agacaagtcccaagcgcagaa

SEQ ID NO: 37921 - DNA, 21 bp, Artificial Sequence
  Description of Artificial Sequence: Synthetic oligonucleotide
agaagagacgacggaagcagc

SEQ ID NO: 37922 - DNA, 21 bp, Artificial Sequence
  Description of Artificial Sequence: Synthetic oligonucleotide
agaagagacgaactcacactc

SEQ ID NO: 37923 - DNA, 21 bp, Artificial Sequence
  Description of Artificial Sequence: Synthetic oligonucleotide
agaagagacggaatgctcatg

SEQ ID NO: 37924 - DNA, 21 bp, Artificial Sequence
  Description of Artificial Sequence: Synthetic oligonucleotide
agaagagaccacgcaccaatc

SEQ ID NO: 37925 - DNA, 21 bp, Artificial Sequence
  Description of Artificial Sequence: Synthetic oligonucleotide
agaagagacccaagcacagtc

SEQ ID NO: 37926 - DNA, 21 bp, Artificial Sequence
  Description of Artificial Sequence: Synthetic oligonucleotide
agaagagaccaaccagtccca

SEQ ID NO: 37927 - DNA, 21 bp, Artificial Sequence
  Description of Artificial Sequence: Synthetic oligonucleotide
agaagagacgtcagcggacca

SEQ ID NO: 37928 - DNA, 21 bp, Artificial Sequence
  Description of Artificial Sequence: Synthetic oligonucleotide
agaagagaaagcggaatcgga

SEQ ID NO: 37929 - DNA, 21 bp, Artificial Sequence
  Description of Artificial Sequence: Synthetic oligonucleotide
agaagaggaacaagcgaacca

SEQ ID NO: 37930 - DNA, 21 bp, Artificial Sequence
  Description of Artificial Sequence: Synthetic oligonucleotide
agaagactcccaggagacgtc

SEQ ID NO: 37931 - DNA, 21 bp, Artificial Sequence
  Description of Artificial Sequence: Synthetic oligonucleotide
agaagaaacgacgcactccca

SEQ ID NO: 37932 - DNA, 21 bp, Artificial Sequence
  Description of Artificial Sequence: Synthetic oligonucleotide
agaagaccagaaatcgaaaga

SEQ ID NO: 37933 - DNA, 21 bp, Artificial Sequence
  Description of Artificial Sequence: Synthetic oligonucleotide
agaagaccaagcctcagcgac

SEQ ID NO: 37934 - DNA, 21 bp, Artificial Sequence
  Description of Artificial Sequence: Synthetic oligonucleotide
agaagaccaagcccagacgtc

SEQ ID NO: 37935 - DNA, 21 bp, Artificial Sequence
  Description of Artificial Sequence: Synthetic oligonucleotide
agaagaagcgacctctacgtc

SEQ ID NO: 37936 - DNA, 21 bp, Artificial Sequence
  Description of Artificial Sequence: Synthetic oligonucleotide
agaagaacagacacactctac

SEQ ID NO: 37937 - DNA, 21 bp, Artificial Sequence
  Description of Artificial Sequence: Synthetic oligonucleotide
agaagagtcggaacaggagac

SEQ ID NO: 37938 - DNA, 21 bp, Artificial Sequence
  Description of Artificial Sequence: Synthetic oligonucleotide
agaagcgcagcagcagtctac

SEQ ID NO: 37939 - DNA, 21 bp, Artificial Sequence
  Description of Artificial Sequence: Synthetic oligonucleotide
agaagcgcagcaatgagcgaa

SEQ ID NO: 37940 - DNA, 21 bp, Artificial Sequence
  Description of Artificial Sequence: Synthetic oligonucleotide
agaagcgcagcaacaagcaca

SEQ ID NO: 37941 - DNA, 21 bp, Artificial Sequence
  Description of Artificial Sequence: Synthetic oligonucleotide
agaagcgcagcagtcacatac

SEQ ID NO: 37942 - DNA, 21 bp, Artificial Sequence
  Description of Artificial Sequence: Synthetic oligonucleotide
agaagcgcaggaccaaacgaa

SEQ ID NO: 37943 - DNA, 21 bp, Artificial Sequence
  Description of Artificial Sequence: Synthetic oligonucleotide
agaagcgcactcaacacaagc

SEQ ID NO: 37944 - DNA, 21 bp, Artificial Sequence
  Description of Artificial Sequence: Synthetic oligonucleotide
agaagcgcactcccaaacctc

SEQ ID NO: 37945 - DNA, 21 bp, Artificial Sequence
  Description of Artificial Sequence: Synthetic oligonucleotide
agaagcgcaatggcaggacca

SEQ ID NO: 37946 - DNA, 21 bp, Artificial Sequence
  Description of Artificial Sequence: Synthetic oligonucleotide
agaagcgcaaaccaaagcgtc

SEQ ID NO: 37947 - DNA, 21 bp, Artificial Sequence
  Description of Artificial Sequence: Synthetic oligonucleotide
agaagcgcaccagcagtcatc

SEQ ID NO: 37948 - DNA, 21 bp, Artificial Sequence
  Description of Artificial Sequence: Synthetic oligonucleotide
agaagcgcaccagaactcaca

SEQ ID NO: 37949 - DNA, 21 bp, Artificial Sequence
  Description of Artificial Sequence: Synthetic oligonucleotide
agaagcgcacaactcacagca

SEQ ID NO: 37950 - DNA, 21 bp, Artificial Sequence
  Description of Artificial Sequence: Synthetic oligonucleotide
agaagcgcacaaaacagcctc

SEQ ID NO: 37951 - DNA, 21 bp, Artificial Sequence
  Description of Artificial Sequence: Synthetic oligonucleotide
agaagcgcaagcctccaaagc

SEQ ID NO: 37952 - DNA, 21 bp, Artificial Sequence
  Description of Artificial Sequence: Synthetic oligonucleotide
agaagcgcagtcccagacagc

SEQ ID NO: 37953 - DNA, 21 bp, Artificial Sequence
  Description of Artificial Sequence: Synthetic oligonucleotide
agaagcgacgaactcagaaca

SEQ ID NO: 37954 - DNA, 21 bp, Artificial Sequence
  Description of Artificial Sequence: Synthetic oligonucleotide
agaagcgacggaagaagcatc

SEQ ID NO: 37955 - DNA, 21 bp, Artificial Sequence
  Description of Artificial Sequence: Synthetic oligonucleotide
agaagcgacccagcaagaaca

SEQ ID NO: 37956 - DNA, 21 bp, Artificial Sequence
  Description of Artificial Sequence: Synthetic oligonucleotide
agaagcgacagcagaccactc

SEQ ID NO: 37957 - DNA, 21 bp, Artificial Sequence
  Description of Artificial Sequence: Synthetic oligonucleotide
agaagcgacagcgtcacacac

SEQ ID NO: 37958 - DNA, 21 bp, Artificial Sequence
  Description of Artificial Sequence: Synthetic oligonucleotide
agaagcgacgtcagactcgca

SEQ ID NO: 37959 - DNA, 21 bp, Artificial Sequence
  Description of Artificial Sequence: Synthetic oligonucleotide
agaagcgaagaaatcagagac

SEQ ID NO: 37960 - DNA, 21 bp, Artificial Sequence
  Description of Artificial Sequence: Synthetic oligonucleotide
agaagcgaaatcctcgtcaca

SEQ ID NO: 37961 - DNA, 21 bp, Artificial Sequence
  Description of Artificial Sequence: Synthetic oligonucleotide
agaagcgaaaaagtcgcacca

SEQ ID NO: 37962 - DNA, 21 bp, Artificial Sequence
  Description of Artificial Sequence: Synthetic oligonucleotide
agaagcgaaccagacgaatac

SEQ ID NO: 37963 - DNA, 21 bp, Artificial Sequence
  Description of Artificial Sequence: Synthetic oligonucleotide
agaagcgaatacgcaccacaa

SEQ ID NO: 37964 - DNA, 21 bp, Artificial Sequence
  Description of Artificial Sequence: Synthetic oligonucleotide
agaagcggacacagcggatac

SEQ ID NO: 37965 - DNA, 21 bp, Artificial Sequence
  Description of Artificial Sequence: Synthetic oligonucleotide
agaagcggactcgcaagcgga

SEQ ID NO: 37966 - DNA, 21 bp, Artificial Sequence
  Description of Artificial Sequence: Synthetic oligonucleotide
agaagcggactcgacaaaaca

SEQ ID NO: 37967 - DNA, 21 bp, Artificial Sequence
  Description of Artificial Sequence: Synthetic oligonucleotide
agaagcggactcaaagaactc

SEQ ID NO: 37968 - DNA, 21 bp, Artificial Sequence
  Description of Artificial Sequence: Synthetic oligonucleotide
agaagcggaatggtcagcgca

SEQ ID NO: 37969 - DNA, 21 bp, Artificial Sequence
  Description of Artificial Sequence: Synthetic oligonucleotide
agaagcggacaagacgcactc

SEQ ID NO: 37970 - DNA, 21 bp, Artificial Sequence
  Description of Artificial Sequence: Synthetic oligonucleotide
agaagcggaagcggactcgaa

SEQ ID NO: 37971 - DNA, 21 bp, Artificial Sequence
  Description of Artificial Sequence: Synthetic oligonucleotide
agaagccacaacgaagaagaa

SEQ ID NO: 37972 - DNA, 21 bp, Artificial Sequence
  Description of Artificial Sequence: Synthetic oligonucleotide
agaagccacagcacagacagc

SEQ ID NO: 37973 - DNA, 21 bp, Artificial Sequence
  Description of Artificial Sequence: Synthetic oligonucleotide
agaagcatcgcagcagacgca

SEQ ID NO: 37974 - DNA, 21 bp, Artificial Sequence
  Description of Artificial Sequence: Synthetic oligonucleotide
agaagcatcgcatggagcgaa

SEQ ID NO: 37975 - DNA, 21 bp, Artificial Sequence
  Description of Artificial Sequence: Synthetic oligonucleotide
agaagcatcgaaaacgcagac

SEQ ID NO: 37976 - DNA, 21 bp, Artificial Sequence
  Description of Artificial Sequence: Synthetic oligonucleotide
agaagcatcccagacccaaca

SEQ ID NO: 37977 - DNA, 21 bp, Artificial Sequence
  Description of Artificial Sequence: Synthetic oligonucleotide
agaagcatccaaccaacaaac

SEQ ID NO: 37978 - DNA, 21 bp, Artificial Sequence
  Description of Artificial Sequence: Synthetic oligonucleotide
agaagcatccaaacaaaccca

SEQ ID NO: 37979 - DNA, 21 bp, Artificial Sequence
  Description of Artificial Sequence: Synthetic oligonucleotide
agaagcaaagaagcaacaagc

SEQ ID NO: 37980 - DNA, 21 bp, Artificial Sequence
  Description of Artificial Sequence: Synthetic oligonucleotide
agaagcaaacaagcaagcgaa

SEQ ID NO: 37981 - DNA, 21 bp, Artificial Sequence
  Description of Artificial Sequence: Synthetic oligonucleotide
agaagcaaaagcagcgaccca

SEQ ID NO: 37982 - DNA, 21 bp, Artificial Sequence
  Description of Artificial Sequence: Synthetic oligonucleotide
agaagcctcgacttcccagac

SEQ ID NO: 37983 - DNA, 21 bp, Artificial Sequence
  Description of Artificial Sequence: Synthetic oligonucleotide
agaagcctcgaacacagcaac

SEQ ID NO: 37984 - DNA, 21 bp, Artificial Sequence
  Description of Artificial Sequence: Synthetic oligonucleotide
agaagcctccacggaagccaa

SEQ ID NO: 37985 - DNA, 21 bp, Artificial Sequence
  Description of Artificial Sequence: Synthetic oligonucleotide
agaagcctcaacgcactccca

SEQ ID NO: 37986 - DNA, 21 bp, Artificial Sequence
  Description of Artificial Sequence: Synthetic oligonucleotide
agaagcctcaacagcacagca

SEQ ID NO: 37987 - DNA, 21 bp, Artificial Sequence
  Description of Artificial Sequence: Synthetic oligonucleotide
agaagcctcccagcagaaaca

SEQ ID NO: 37988 - DNA, 21 bp, Artificial Sequence
  Description of Artificial Sequence: Synthetic oligonucleotide
agaagcctcccaagcccacac

SEQ ID NO: 37989 - DNA, 21 bp, Artificial Sequence
  Description of Artificial Sequence: Synthetic oligonucleotide
agaagcctccaactcagcgac

SEQ ID NO: 37990 - DNA, 21 bp, Artificial Sequence
  Description of Artificial Sequence: Synthetic oligonucleotide
agaagcctcagcttcgcagca

SEQ ID NO: 37991 - DNA, 21 bp, Artificial Sequence
  Description of Artificial Sequence: Synthetic oligonucleotide
agaagcctcagcctcctcgga

SEQ ID NO: 37992 - DNA, 21 bp, Artificial Sequence
  Description of Artificial Sequence: Synthetic oligonucleotide
agaagcctcagcctcccacca

SEQ ID NO: 37993 - DNA, 21 bp, Artificial Sequence
  Description of Artificial Sequence: Synthetic oligonucleotide
agaagcctcagcccaacaaga

SEQ ID NO: 37994 - DNA, 21 bp, Artificial Sequence
  Description of Artificial Sequence: Synthetic oligonucleotide
agaagcctcacagtcacagca

SEQ ID NO: 37995 - DNA, 21 bp, Artificial Sequence
  Description of Artificial Sequence: Synthetic oligonucleotide
agaagcatggcagaaagcgtc

SEQ ID NO: 37996 - DNA, 21 bp, Artificial Sequence
  Description of Artificial Sequence: Synthetic oligonucleotide
agaagcatgcacgcaggagca

SEQ ID NO: 37997 - DNA, 21 bp, Artificial Sequence
  Description of Artificial Sequence: Synthetic oligonucleotide
agaagcatgatgctcagccca

SEQ ID NO: 37998 - DNA, 21 bp, Artificial Sequence
  Description of Artificial Sequence: Synthetic oligonucleotide
agaagcatgccaagcggagca

SEQ ID NO: 37999 - DNA, 21 bp, Artificial Sequence
  Description of Artificial Sequence: Synthetic oligonucleotide
agaagcatgccaacaacaaca

SEQ ID NO: 38000 - DNA, 21 bp, Artificial Sequence
  Description of Artificial Sequence: Synthetic oligonucleotide
agaagcatgacaggagcactc

SEQ ID NO: 38001 - DNA, 21 bp, Artificial Sequence
  Description of Artificial Sequence: Synthetic oligonucleotide
agaagcaacaaagaaacaagc

SEQ ID NO: 38002 - DNA, 21 bp, Artificial Sequence
  Description of Artificial Sequence: Synthetic oligonucleotide
agaagcaacctcgaaggactc

SEQ ID NO: 38003 - DNA, 21 bp, Artificial Sequence
  Description of Artificial Sequence: Synthetic oligonucleotide
agaagcaacatgccaatggga

SEQ ID NO: 38004 - DNA, 21 bp, Artificial Sequence
  Description of Artificial Sequence: Synthetic oligonucleotide
agaagcaacccagcaccattc

SEQ ID NO: 38005 - DNA, 21 bp, Artificial Sequence
  Description of Artificial Sequence: Synthetic oligonucleotide
agaagcaacccagtcggaaca

SEQ ID NO: 38006 - DNA, 21 bp, Artificial Sequence
  Description of Artificial Sequence: Synthetic oligonucleotide
agaagcaacagcgacgcagtc

SEQ ID NO: 38007 - DNA, 21 bp, Artificial Sequence
  Description of Artificial Sequence: Synthetic oligonucleotide
agaagcaacgtcgaaagcaaa

SEQ ID NO: 38008 - DNA, 21 bp, Artificial Sequence
  Description of Artificial Sequence: Synthetic oligonucleotide
agaagcaacgtcctcgcacaa

SEQ ID NO: 38009 - DNA, 21 bp, Artificial Sequence
  Description of Artificial Sequence: Synthetic oligonucleotide
agaagcccagacacaacagga

SEQ ID NO: 38010 - DNA, 21 bp, Artificial Sequence
  Description of Artificial Sequence: Synthetic oligonucleotide
agaagcccagaaaaagcactc

SEQ ID NO: 38011 - DNA, 21 bp, Artificial Sequence
  Description of Artificial Sequence: Synthetic oligonucleotide
agaagcccattcggaagcgca

SEQ ID NO: 38012 - DNA, 21 bp, Artificial Sequence
  Description of Artificial Sequence: Synthetic oligonucleotide
agaagcccaggaaacgtcgga

SEQ ID NO: 38013 - DNA, 21 bp, Artificial Sequence
  Description of Artificial Sequence: Synthetic oligonucleotide
agaagcccaccacaagacatg

SEQ ID NO: 38014 - DNA, 21 bp, Artificial Sequence
  Description of Artificial Sequence: Synthetic oligonucleotide
agaagcccaccaacaatcgca

SEQ ID NO: 38015 - DNA, 21 bp, Artificial Sequence
  Description of Artificial Sequence: Synthetic oligonucleotide
agaagcccacaactctacgca

SEQ ID NO: 38016 - DNA, 21 bp, Artificial Sequence
  Description of Artificial Sequence: Synthetic oligonucleotide
agaagcccacaagtcatgctc

SEQ ID NO: 38017 - DNA, 21 bp, Artificial Sequence
  Description of Artificial Sequence: Synthetic oligonucleotide
agaagcccaagcggaacaaca

SEQ ID NO: 38018 - DNA, 21 bp, Artificial Sequence
  Description of Artificial Sequence: Synthetic oligonucleotide
agaagcccaagcacaagcaac

SEQ ID NO: 38019 - DNA, 21 bp, Artificial Sequence
  Description of Artificial Sequence: Synthetic oligonucleotide
agaagcccaagcgtcctccca

SEQ ID NO: 38020 - DNA, 21 bp, Artificial Sequence
  Description of Artificial Sequence: Synthetic oligonucleotide
agaagcccaacattcgcacca

SEQ ID NO: 38021 - DNA, 21 bp, Artificial Sequence
  Description of Artificial Sequence: Synthetic oligonucleotide
agaagcccaacaagcgtcgca

SEQ ID NO: 38022 - DNA, 21 bp, Artificial Sequence
  Description of Artificial Sequence: Synthetic oligonucleotide
agaagcccagtcaaaggactc

SEQ ID NO: 38023 - DNA, 21 bp, Artificial Sequence
  Description of Artificial Sequence: Synthetic oligonucleotide
agaagccaagcacaagtcatc

SEQ ID NO: 38024 - DNA, 21 bp, Artificial Sequence
  Description of Artificial Sequence: Synthetic oligonucleotide
agaagccaaatcagcgacagc

SEQ ID NO: 38025 - DNA, 21 bp, Artificial Sequence
  Description of Artificial Sequence: Synthetic oligonucleotide
agaagccaactcatgggagca

SEQ ID NO: 38026 - DNA, 21 bp, Artificial Sequence
  Description of Artificial Sequence: Synthetic oligonucleotide
agaagccaaaaccaaggactc

SEQ ID NO: 38027 - DNA, 21 bp, Artificial Sequence
  Description of Artificial Sequence: Synthetic oligonucleotide
agaagccaaccactcagcctc

SEQ ID NO: 38028 - DNA, 21 bp, Artificial Sequence
  Description of Artificial Sequence: Synthetic oligonucleotide
agaagccaaccaagcacagga

SEQ ID NO: 38029 - DNA, 21 bp, Artificial Sequence
  Description of Artificial Sequence: Synthetic oligonucleotide
agaagccaacaaccatacgaa

SEQ ID NO: 38030 - DNA, 21 bp, Artificial Sequence
  Description of Artificial Sequence: Synthetic oligonucleotide
agaagccaaagcgcaacactc

SEQ ID NO: 38031 - DNA, 21 bp, Artificial Sequence
  Description of Artificial Sequence: Synthetic oligonucleotide
agaagccaaacaaacatgtac

SEQ ID NO: 38032 - DNA, 21 bp, Artificial Sequence
  Description of Artificial Sequence: Synthetic oligonucleotide
agaagcagagacagcgaacac

SEQ ID NO: 38033 - DNA, 21 bp, Artificial Sequence
  Description of Artificial Sequence: Synthetic oligonucleotide
agaagcagcgcattcggacca

SEQ ID NO: 38034 - DNA, 21 bp, Artificial Sequence
  Description of Artificial Sequence: Synthetic oligonucleotide
agaagcagcgaatacggaagc

SEQ ID NO: 38035 - DNA, 21 bp, Artificial Sequence
  Description of Artificial Sequence: Synthetic oligonucleotide
agaagcagcttcaacaaagac

SEQ ID NO: 38036 - DNA, 21 bp, Artificial Sequence
  Description of Artificial Sequence: Synthetic oligonucleotide
agaagcagccacggaggagaa

SEQ ID NO: 38037 - DNA, 21 bp, Artificial Sequence
  Description of Artificial Sequence: Synthetic oligonucleotide
agaagcagcctcaacctccac

SEQ ID NO: 38038 - DNA, 21 bp, Artificial Sequence
  Description of Artificial Sequence: Synthetic oligonucleotide
agaagcagcaacctcaacgca

SEQ ID NO: 38039 - DNA, 21 bp, Artificial Sequence
  Description of Artificial Sequence: Synthetic oligonucleotide
agaagcagcccaaacttccaa

SEQ ID NO: 38040 - DNA, 21 bp, Artificial Sequence
  Description of Artificial Sequence: Synthetic oligonucleotide
agaagcagcccaaacagccca

SEQ ID NO: 38041 - DNA, 21 bp, Artificial Sequence
  Description of Artificial Sequence: Synthetic oligonucleotide
agaagcagcccaagcgacaaa

SEQ ID NO: 38042 - DNA, 21 bp, Artificial Sequence
  Description of Artificial Sequence: Synthetic oligonucleotide
agaagcagcccatacctcgaa

SEQ ID NO: 38043 - DNA, 21 bp, Artificial Sequence
  Description of Artificial Sequence: Synthetic oligonucleotide
agaagcagcagcgcagtcgtc

SEQ ID NO: 38044 - DNA, 21 bp, Artificial Sequence
  Description of Artificial Sequence: Synthetic oligonucleotide
agaagcagcagcctcacacca

SEQ ID NO: 38045 - DNA, 21 bp, Artificial Sequence
  Description of Artificial Sequence: Synthetic oligonucleotide
agaagcagcagcaacccactc

SEQ ID NO: 38046 - DNA, 21 bp, Artificial Sequence
  Description of Artificial Sequence: Synthetic oligonucleotide
agaagcagcagcccaacaaca

SEQ ID NO: 38047 - DNA, 21 bp, Artificial Sequence
  Description of Artificial Sequence: Synthetic oligonucleotide
agaagcagcagcacacaaagc

SEQ ID NO: 38048 - DNA, 21 bp, Artificial Sequence
  Description of Artificial Sequence: Synthetic oligonucleotide
agaagcagcacacacagcgga

SEQ ID NO: 38049 - DNA, 21 bp, Artificial Sequence
  Description of Artificial Sequence: Synthetic oligonucleotide
agaagcagcacacaaatccca

SEQ ID NO: 38050 - DNA, 21 bp, Artificial Sequence
  Description of Artificial Sequence: Synthetic oligonucleotide
agaagcagcacaacactccca

SEQ ID NO: 38051 - DNA, 21 bp, Artificial Sequence
  Description of Artificial Sequence: Synthetic oligonucleotide
agaagcagctacacagaacac

SEQ ID NO: 38052 - DNA, 21 bp, Artificial Sequence
  Description of Artificial Sequence: Synthetic oligonucleotide
agaagcacagcagacagagac

SEQ ID NO: 38053 - DNA, 21 bp, Artificial Sequence
  Description of Artificial Sequence: Synthetic oligonucleotide
agaagcacagcaatcgacttc

SEQ ID NO: 38054 - DNA, 21 bp, Artificial Sequence
  Description of Artificial Sequence: Synthetic oligonucleotide
agaagcacagcactcccagac

SEQ ID NO: 38055 - DNA, 21 bp, Artificial Sequence
  Description of Artificial Sequence: Synthetic oligonucleotide
agaagcacaggaccaagcgtc

SEQ ID NO: 38056 - DNA, 21 bp, Artificial Sequence
  Description of Artificial Sequence: Synthetic oligonucleotide
agaagcacactcaacagccca

SEQ ID NO: 38057 - DNA, 21 bp, Artificial Sequence
  Description of Artificial Sequence: Synthetic oligonucleotide
agaagcacaatgagcaacagc

SEQ ID NO: 38058 - DNA, 21 bp, Artificial Sequence
  Description of Artificial Sequence: Synthetic oligonucleotide
agaagcacaaacaacctcaca

SEQ ID NO: 38059 - DNA, 21 bp, Artificial Sequence
  Description of Artificial Sequence: Synthetic oligonucleotide
agaagcacaagcccactccca

SEQ ID NO: 38060 - DNA, 21 bp, Artificial Sequence
  Description of Artificial Sequence: Synthetic oligonucleotide
agaagcacaacaagccaccca

SEQ ID NO: 38061 - DNA, 21 bp, Artificial Sequence
  Description of Artificial Sequence: Synthetic oligonucleotide
agaagcgtcgcaacaggagtc

SEQ ID NO: 38062 - DNA, 21 bp, Artificial Sequence
  Description of Artificial Sequence: Synthetic oligonucleotide
agaagcgtcgaaccactcgca

SEQ ID NO: 38063 - DNA, 21 bp, Artificial Sequence
  Description of Artificial Sequence: Synthetic oligonucleotide
agaagcgtcaaattcccaatg

SEQ ID NO: 38064 - DNA, 21 bp, Artificial Sequence
  Description of Artificial Sequence: Synthetic oligonucleotide
agaagcgtcccagaaagcaga

SEQ ID NO: 38065 - DNA, 21 bp, Artificial Sequence
  Description of Artificial Sequence: Synthetic oligonucleotide
agaagcgtccaaacaccaagc

SEQ ID NO: 38066 - DNA, 21 bp, Artificial Sequence
  Description of Artificial Sequence: Synthetic oligonucleotide
agaagcgtcagacaaaacgac

SEQ ID NO: 38067 - DNA, 21 bp, Artificial Sequence
  Description of Artificial Sequence: Synthetic oligonucleotide
agaagcgtcacagcaaacaac

SEQ ID NO: 38068 - DNA, 21 bp, Artificial Sequence
  Description of Artificial Sequence: Synthetic oligonucleotide
agaagcgtcacaccaggaatc

SEQ ID NO: 38069 - DNA, 21 bp, Artificial Sequence
  Description of Artificial Sequence: Synthetic oligonucleotide
agaagcgtcgtcgcacaaaca

SEQ ID NO: 38070 - DNA, 21 bp, Artificial Sequence
  Description of Artificial Sequence: Synthetic oligonucleotide
agaagctacggactcccagaa

SEQ ID NO: 38071 - DNA, 21 bp, Artificial Sequence
  Description of Artificial Sequence: Synthetic oligonucleotide
agaagctacaacccagaaagc

SEQ ID NO: 38072 - DNA, 21 bp, Artificial Sequence
  Description of Artificial Sequence: Synthetic oligonucleotide
agaagctacagcccaccaaca

SEQ ID NO: 38073 - DNA, 21 bp, Artificial Sequence
  Description of Artificial Sequence: Synthetic oligonucleotide
agaacagcagcaacatgcgca

SEQ ID NO: 38074 - DNA, 21 bp, Artificial Sequence
  Description of Artificial Sequence: Synthetic oligonucleotide
agaacagcagacatgagcgga

SEQ ID NO: 38075 - DNA, 21 bp, Artificial Sequence
  Description of Artificial Sequence: Synthetic oligonucleotide
agaacagcaatcggaaacctc

SEQ ID NO: 38076 - DNA, 21 bp, Artificial Sequence
  Description of Artificial Sequence: Synthetic oligonucleotide
agaacagcaaacccaacacca

SEQ ID NO: 38077 - DNA, 21 bp, Artificial Sequence
  Description of Artificial Sequence: Synthetic oligonucleotide
agaacagcaagcctcgtccca

SEQ ID NO: 38078 - DNA, 21 bp, Artificial Sequence
  Description of Artificial Sequence: Synthetic oligonucleotide
agaacagcaagcgtcgcagca

SEQ ID NO: 38079 - DNA, 21 bp, Artificial Sequence
  Description of Artificial Sequence: Synthetic oligonucleotide
agaacagcagtcacagacaca

SEQ ID NO: 38080 - DNA, 21 bp, Artificial Sequence
  Description of Artificial Sequence: Synthetic oligonucleotide
agaacagacggagacgtcaaa

SEQ ID NO: 38081 - DNA, 21 bp, Artificial Sequence
  Description of Artificial Sequence: Synthetic oligonucleotide
agaacagaattcaacatgcca

SEQ ID NO: 38082 - DNA, 21 bp, Artificial Sequence
  Description of Artificial Sequence: Synthetic oligonucleotide
agaacagaaggatgcgcagca

SEQ ID NO: 38083 - DNA, 21 bp, Artificial Sequence
  Description of Artificial Sequence: Synthetic oligonucleotide
agaacagaaccaggaccaagc

SEQ ID NO: 38084 - DNA, 21 bp, Artificial Sequence
  Description of Artificial Sequence: Synthetic oligonucleotide
agaacagaaagcccaccacaa

SEQ ID NO: 38085 - DNA, 21 bp, Artificial Sequence
  Description of Artificial Sequence: Synthetic oligonucleotide
agaacagaaacaggaaaactc

SEQ ID NO: 38086 - DNA, 21 bp, Artificial Sequence
  Description of Artificial Sequence: Synthetic oligonucleotide
agaacattcagcggagcagac

SEQ ID NO: 38087 - DNA, 21 bp, Artificial Sequence
  Description of Artificial Sequence: Synthetic oligonucleotide
agaacaggagcactcagcgaa

SEQ ID NO: 38088 - DNA, 21 bp, Artificial Sequence
  Description of Artificial Sequence: Synthetic oligonucleotide
agaacaggagaagtcacattc

SEQ ID NO: 38089 - DNA, 21 bp, Artificial Sequence
  Description of Artificial Sequence: Synthetic oligonucleotide
agaacaggaaacgcagcaagc

SEQ ID NO: 38090 - DNA, 21 bp, Artificial Sequence
  Description of Artificial Sequence: Synthetic oligonucleotide
agaacaggaccaggaagcgaa

SEQ ID NO: 38091 - DNA, 21 bp, Artificial Sequence
  Description of Artificial Sequence: Synthetic oligonucleotide
agaacaggaccaacaccaagc

SEQ ID NO: 38092 - DNA, 21 bp, Artificial Sequence
  Description of Artificial Sequence: Synthetic oligonucleotide
agaacaggaagctacccacaa

SEQ ID NO: 38093 - DNA, 21 bp, Artificial Sequence
  Description of Artificial Sequence: Synthetic oligonucleotide
agaacaggagtctgcggaaac

SEQ ID NO: 38094 - DNA, 21 bp, Artificial Sequence
  Description of Artificial Sequence: Synthetic oligonucleotide
agaacacacagcccagcagga

SEQ ID NO: 38095 - DNA, 21 bp, Artificial Sequence
  Description of Artificial Sequence: Synthetic oligonucleotide
agaacactcggaccagtcgga

SEQ ID NO: 38096 - DNA, 21 bp, Artificial Sequence
  Description of Artificial Sequence: Synthetic oligonucleotide
agaacactcatgccacaccca

SEQ ID NO: 38097 - DNA, 21 bp, Artificial Sequence
  Description of Artificial Sequence: Synthetic oligonucleotide
agaacactcaacagcgtcgca

SEQ ID NO: 38098 - DNA, 21 bp, Artificial Sequence
  Description of Artificial Sequence: Synthetic oligonucleotide
agaacaatggacgcaccagtc

SEQ ID NO: 38099 - DNA, 21 bp, Artificial Sequence
  Description of Artificial Sequence: Synthetic oligonucleotide
agaacaaacggagacgtcaaa

SEQ ID NO: 38100 - DNA, 21 bp, Artificial Sequence
  Description of Artificial Sequence: Synthetic oligonucleotide
agaacaaacggactcagccca

SEQ ID NO: 38101 - DNA, 21 bp, Artificial Sequence
  Description of Artificial Sequence: Synthetic oligonucleotide
agaacaaacaacgacgtcaca

SEQ ID NO: 38102 - DNA, 21 bp, Artificial Sequence
  Description of Artificial Sequence: Synthetic oligonucleotide
agaacaaacagccaactcgac

SEQ ID NO: 38103 - DNA, 21 bp, Artificial Sequence
  Description of Artificial Sequence: Synthetic oligonucleotide
agaacaaacagcacaagcatg

SEQ ID NO: 38104 - DNA, 21 bp, Artificial Sequence
  Description of Artificial Sequence: Synthetic oligonucleotide
agaacaccagcactcagcaac

SEQ ID NO: 38105 - DNA, 21 bp, Artificial Sequence
  Description of Artificial Sequence: Synthetic oligonucleotide
agaacaccagacagcctcgga

SEQ ID NO: 38106 - DNA, 21 bp, Artificial Sequence
  Description of Artificial Sequence: Synthetic oligonucleotide
agaacaccagaagcaatcagc

SEQ ID NO: 38107 - DNA, 21 bp, Artificial Sequence
  Description of Artificial Sequence: Synthetic oligonucleotide
agaacaccacacagcagcttc

SEQ ID NO: 38108 - DNA, 21 bp, Artificial Sequence
  Description of Artificial Sequence: Synthetic oligonucleotide
agaacaccaaaactcccaatg

SEQ ID NO: 38109 - DNA, 21 bp, Artificial Sequence
  Description of Artificial Sequence: Synthetic oligonucleotide
agaacaccaatgctcgaacca

SEQ ID NO: 38110 - DNA, 21 bp, Artificial Sequence
  Description of Artificial Sequence: Synthetic oligonucleotide
agaacaccagtcagcggagaa

SEQ ID NO: 38111 - DNA, 21 bp, Artificial Sequence
  Description of Artificial Sequence: Synthetic oligonucleotide
agaacacaaatcggagtcaac

SEQ ID NO: 38112 - DNA, 21 bp, Artificial Sequence
  Description of Artificial Sequence: Synthetic oligonucleotide
agaacaagcgcagtcggactc

SEQ ID NO: 38113 - DNA, 21 bp, Artificial Sequence
  Description of Artificial Sequence: Synthetic oligonucleotide
agaacaagctgcagcccagga

SEQ ID NO: 38114 - DNA, 21 bp, Artificial Sequence
  Description of Artificial Sequence: Synthetic oligonucleotide
agaacaagcgacgcaagcttc

SEQ ID NO: 38115 - DNA, 21 bp, Artificial Sequence
  Description of Artificial Sequence: Synthetic oligonucleotide
agaacaagcgacctcagcgca

SEQ ID NO: 38116 - DNA, 21 bp, Artificial Sequence
  Description of Artificial Sequence: Synthetic oligonucleotide
agaacaagcggaccaacagac

SEQ ID NO: 38117 - DNA, 21 bp, Artificial Sequence
  Description of Artificial Sequence: Synthetic oligonucleotide
agaacaagcatgggacaagca

SEQ ID NO: 38118 - DNA, 21 bp, Artificial Sequence
  Description of Artificial Sequence: Synthetic oligonucleotide
agaacaagcatggtcagcaac

SEQ ID NO: 38119 - DNA, 21 bp, Artificial Sequence
  Description of Artificial Sequence: Synthetic oligonucleotide
agaacaagcccagaaagcaga

SEQ ID NO: 38120 - DNA, 21 bp, Artificial Sequence
  Description of Artificial Sequence: Synthetic oligonucleotide
agaacaagcccactcgcagtc

SEQ ID NO: 38121 - DNA, 21 bp, Artificial Sequence
  Description of Artificial Sequence: Synthetic oligonucleotide
agaacaagcccacaaagcagc

SEQ ID NO: 38122 - DNA, 21 bp, Artificial Sequence
  Description of Artificial Sequence: Synthetic oligonucleotide
agaacaagcccaagcttccac

SEQ ID NO: 38123 - DNA, 21 bp, Artificial Sequence
  Description of Artificial Sequence: Synthetic oligonucleotide
agaacaagccaaacagaacca

SEQ ID NO: 38124 - DNA, 21 bp, Artificial Sequence
  Description of Artificial Sequence: Synthetic oligonucleotide
agaacaagcacagaaggaagc

SEQ ID NO: 38125 - DNA, 21 bp, Artificial Sequence
  Description of Artificial Sequence: Synthetic oligonucleotide
agaacaagcacatacggagga

SEQ ID NO: 38126 - DNA, 21 bp, Artificial Sequence
  Description of Artificial Sequence: Synthetic oligonucleotide
agaacaagcgtcgcagtcgca

SEQ ID NO: 38127 - DNA, 21 bp, Artificial Sequence
  Description of Artificial Sequence: Synthetic oligonucleotide
agaacaacagacaaacaagga

SEQ ID NO: 38128 - DNA, 21 bp, Artificial Sequence
  Description of Artificial Sequence: Synthetic oligonucleotide
agaacaacagaacacagcatg

SEQ ID NO: 38129 - DNA, 21 bp, Artificial Sequence
  Description of Artificial Sequence: Synthetic oligonucleotide
agaacaacacaaagcgtcatg

SEQ ID NO: 38130 - DNA, 21 bp, Artificial Sequence
  Description of Artificial Sequence: Synthetic oligonucleotide
agaacaacaagcgacacattc

SEQ ID NO: 38131 - DNA, 21 bp, Artificial Sequence
  Description of Artificial Sequence: Synthetic oligonucleotide
agaacaacataccaaagcagc

SEQ ID NO: 38132 - DNA, 21 bp, Artificial Sequence
  Description of Artificial Sequence: Synthetic oligonucleotide
agaacagtcggaagcctcaac

SEQ ID NO: 38133 - DNA, 21 bp, Artificial Sequence
  Description of Artificial Sequence: Synthetic oligonucleotide
agaacagtcaaagcagaagca

SEQ ID NO: 38134 - DNA, 21 bp, Artificial Sequence
  Description of Artificial Sequence: Synthetic oligonucleotide
agaacataccacgtcccagac

SEQ ID NO: 38135 - DNA, 21 bp, Artificial Sequence
  Description of Artificial Sequence: Synthetic oligonucleotide
agagtcgcagcaagcagcatc

SEQ ID NO: 38136 - DNA, 21 bp, Artificial Sequence
  Description of Artificial Sequence: Synthetic oligonucleotide
agagtcgcaggaagcaacgga

SEQ ID NO: 38137 - DNA, 21 bp, Artificial Sequence
  Description of Artificial Sequence: Synthetic oligonucleotide
agagtcgcaatgggagaagac

SEQ ID NO: 38138 - DNA, 21 bp, Artificial Sequence
  Description of Artificial Sequence: Synthetic oligonucleotide
agagtcgcaagcccaacagca

SEQ ID NO: 38139 - DNA, 21 bp, Artificial Sequence
  Description of Artificial Sequence: Synthetic oligonucleotide
agagtcgacgcaagccacaga

SEQ ID NO: 38140 - DNA, 21 bp, Artificial Sequence
  Description of Artificial Sequence: Synthetic oligonucleotide
agagtcgacagcgtcagaagc

SEQ ID NO: 38141 - DNA, 21 bp, Artificial Sequence
  Description of Artificial Sequence: Synthetic oligonucleotide
agagtcgacacaagaatgcaa

SEQ ID NO: 38142 - DNA, 21 bp, Artificial Sequence
  Description of Artificial Sequence: Synthetic oligonucleotide
agagtcgaagaatgcgtcatc

SEQ ID NO: 38143 - DNA, 21 bp, Artificial Sequence
  Description of Artificial Sequence: Synthetic oligonucleotide
agagtcggagacggaaaacac

SEQ ID NO: 38144 - DNA, 21 bp, Artificial Sequence
  Description of Artificial Sequence: Synthetic oligonucleotide
agagtcggagacaaactccaa

SEQ ID NO: 38145 - DNA, 21 bp, Artificial Sequence
  Description of Artificial Sequence: Synthetic oligonucleotide
agagtcggagacagcgcattc

SEQ ID NO: 38146 - DNA, 21 bp, Artificial Sequence
  Description of Artificial Sequence: Synthetic oligonucleotide
agagtcggaggaagcagcagc

SEQ ID NO: 38147 - DNA, 21 bp, Artificial Sequence
  Description of Artificial Sequence: Synthetic oligonucleotide
agagtcggacactgcctcgga

SEQ ID NO: 38148 - DNA, 21 bp, Artificial Sequence
  Description of Artificial Sequence: Synthetic oligonucleotide
agagtcggactcgcaagcaca

SEQ ID NO: 38149 - DNA, 21 bp, Artificial Sequence
  Description of Artificial Sequence: Synthetic oligonucleotide
agagtcggaaacgtcgacaca

SEQ ID NO: 38150 - DNA, 21 bp, Artificial Sequence
  Description of Artificial Sequence: Synthetic oligonucleotide
agagtcggaagaccaagcgaa

SEQ ID NO: 38151 - DNA, 21 bp, Artificial Sequence
  Description of Artificial Sequence: Synthetic oligonucleotide
agagtcatcccagcatgccaa

SEQ ID NO: 38152 - DNA, 21 bp, Artificial Sequence
  Description of Artificial Sequence: Synthetic oligonucleotide
agagtcctcgacctcgaaaac

SEQ ID NO: 38153 - DNA, 21 bp, Artificial Sequence
  Description of Artificial Sequence: Synthetic oligonucleotide
agagtcctcatcgaaccagtc

SEQ ID NO: 38154 - DNA, 21 bp, Artificial Sequence
  Description of Artificial Sequence: Synthetic oligonucleotide
agagtcctcaaccacctcgga

SEQ ID NO: 38155 - DNA, 21 bp, Artificial Sequence
  Description of Artificial Sequence: Synthetic oligonucleotide
agagtcatggacagagcagca

SEQ ID NO: 38156 - DNA, 21 bp, Artificial Sequence
  Description of Artificial Sequence: Synthetic oligonucleotide
agagtcaacgcaccaggagtc

SEQ ID NO: 38157 - DNA, 21 bp, Artificial Sequence
  Description of Artificial Sequence: Synthetic oligonucleotide
agagtcaaccacgacgaaaca

SEQ ID NO: 38158 - DNA, 21 bp, Artificial Sequence
  Description of Artificial Sequence: Synthetic oligonucleotide
agagtcaacatcctcgcagaa

SEQ ID NO: 38159 - DNA, 21 bp, Artificial Sequence
  Description of Artificial Sequence: Synthetic oligonucleotide
agagtcaacccagacagatac

SEQ ID NO: 38160 - DNA, 21 bp, Artificial Sequence
  Description of Artificial Sequence: Synthetic oligonucleotide
agagtcaacagcatcgcaagc

SEQ ID NO: 38161 - DNA, 21 bp, Artificial Sequence
  Description of Artificial Sequence: Synthetic oligonucleotide
agagtcccagacatcgcaaga

SEQ ID NO: 38162 - DNA, 21 bp, Artificial Sequence
  Description of Artificial Sequence: Synthetic oligonucleotide
agagtcccagacagcacaaga

SEQ ID NO: 38163 - DNA, 21 bp, Artificial Sequence
  Description of Artificial Sequence: Synthetic oligonucleotide
agagtcccaggaatcctccac

SEQ ID NO: 38164 - DNA, 21 bp, Artificial Sequence
  Description of Artificial Sequence: Synthetic oligonucleotide
agagtcccaaacacactccca

SEQ ID NO: 38165 - DNA, 21 bp, Artificial Sequence
  Description of Artificial Sequence: Synthetic oligonucleotide
agagtcccaaactggccagga

SEQ ID NO: 38166 - DNA, 21 bp, Artificial Sequence
  Description of Artificial Sequence: Synthetic oligonucleotide
agagtcccaagccaaagcagc

SEQ ID NO: 38167 - DNA, 21 bp, Artificial Sequence
  Description of Artificial Sequence: Synthetic oligonucleotide
agagtccaaaacggactcaac

SEQ ID NO: 38168 - DNA, 21 bp, Artificial Sequence
  Description of Artificial Sequence: Synthetic oligonucleotide
agagtccaacaagcaagcctc

SEQ ID NO: 38169 - DNA, 21 bp, Artificial Sequence
  Description of Artificial Sequence: Synthetic oligonucleotide
agagtccaaagcaacgtccca

SEQ ID NO: 38170 - DNA, 21 bp, Artificial Sequence
  Description of Artificial Sequence: Synthetic oligonucleotide
agagtccaaacaatcccaagc

SEQ ID NO: 38171 - DNA, 21 bp, Artificial Sequence
  Description of Artificial Sequence: Synthetic oligonucleotide
agagtcagccaaccagacatg

SEQ ID NO: 38172 - DNA, 21 bp, Artificial Sequence
  Description of Artificial Sequence: Synthetic oligonucleotide
agagtcagccaagtcacaatg

SEQ ID NO: 38173 - DNA, 21 bp, Artificial Sequence
  Description of Artificial Sequence: Synthetic oligonucleotide
agagtcagcacaatcagcaca

SEQ ID NO: 38174 - DNA, 21 bp, Artificial Sequence
  Description of Artificial Sequence: Synthetic oligonucleotide
agagtcagcacaacaagcgac

SEQ ID NO: 38175 - DNA, 21 bp, Artificial Sequence
  Description of Artificial Sequence: Synthetic oligonucleotide
agagtcagctacgacacagaa

SEQ ID NO: 38176 - DNA, 21 bp, Artificial Sequence
  Description of Artificial Sequence: Synthetic oligonucleotide
agagtcacaatcggaacaagc

SEQ ID NO: 38177 - DNA, 21 bp, Artificial Sequence
  Description of Artificial Sequence: Synthetic oligonucleotide
agagtcacaccagaactcttc

SEQ ID NO: 38178 - DNA, 21 bp, Artificial Sequence
  Description of Artificial Sequence: Synthetic oligonucleotide
agagtcacaagcacactcagc

SEQ ID NO: 38179 - DNA, 21 bp, Artificial Sequence
  Description of Artificial Sequence: Synthetic oligonucleotide
agagtcacaacagcagaactc

SEQ ID NO: 38180 - DNA, 21 bp, Artificial Sequence
  Description of Artificial Sequence: Synthetic oligonucleotide
agagtcacaacagaactccca

SEQ ID NO: 38181 - DNA, 21 bp, Artificial Sequence
  Description of Artificial Sequence: Synthetic oligonucleotide
agagtcgtcggaggaagcaca

SEQ ID NO: 38182 - DNA, 21 bp, Artificial Sequence
  Description of Artificial Sequence: Synthetic oligonucleotide
agagtcgtcggaccagtcaac

SEQ ID NO: 38183 - DNA, 21 bp, Artificial Sequence
  Description of Artificial Sequence: Synthetic oligonucleotide
agagtcgtcacagtcctcgaa

SEQ ID NO: 38184 - DNA, 21 bp, Artificial Sequence
  Description of Artificial Sequence: Synthetic oligonucleotide
agagtctacaacatggacgga

SEQ ID NO: 38185 - DNA, 21 bp, Artificial Sequence
  Description of Artificial Sequence: Synthetic oligonucleotide
agatgggcagacacagtcaca

SEQ ID NO: 38186 - DNA, 21 bp, Artificial Sequence
  Description of Artificial Sequence: Synthetic oligonucleotide
agatgggacgacggagcaaga

SEQ ID NO: 38187 - DNA, 21 bp, Artificial Sequence
  Description of Artificial Sequence: Synthetic oligonucleotide
agatgggacgtcaaagcagac

SEQ ID NO: 38188 - DNA, 21 bp, Artificial Sequence
  Description of Artificial Sequence: Synthetic oligonucleotide
agatggaaagcagaaccacca

SEQ ID NO: 38189 - DNA, 21 bp, Artificial Sequence
  Description of Artificial Sequence: Synthetic oligonucleotide
agatggagcgaagacggagga

SEQ ID NO: 38190 - DNA, 21 bp, Artificial Sequence
  Description of Artificial Sequence: Synthetic oligonucleotide
agatggagcccagcagtccca

SEQ ID NO: 38191 - DNA, 21 bp, Artificial Sequence
  Description of Artificial Sequence: Synthetic oligonucleotide
agatacgcagaaccatacatc

SEQ ID NO: 38192 - DNA, 21 bp, Artificial Sequence
  Description of Artificial Sequence: Synthetic oligonucleotide
agatacgacctcacagcacca

SEQ ID NO: 38193 - DNA, 21 bp, Artificial Sequence
  Description of Artificial Sequence: Synthetic oligonucleotide
agatacgaaagcaacgcacac

SEQ ID NO: 38194 - DNA, 21 bp, Artificial Sequence
  Description of Artificial Sequence: Synthetic oligonucleotide
agatacggagcaagcaaccca

SEQ ID NO: 38195 - DNA, 21 bp, Artificial Sequence
  Description of Artificial Sequence: Synthetic oligonucleotide
agatacggaggaagcatcagc

SEQ ID NO: 38196 - DNA, 21 bp, Artificial Sequence
  Description of Artificial Sequence: Synthetic oligonucleotide
agataccacgacacaggagac

SEQ ID NO: 38197 - DNA, 21 bp, Artificial Sequence
  Description of Artificial Sequence: Synthetic oligonucleotide
agatacctcgacagaacagaa

SEQ ID NO: 38198 - DNA, 21 bp, Artificial Sequence
  Description of Artificial Sequence: Synthetic oligonucleotide
agatacatggaaccaagccca

SEQ ID NO: 38199 - DNA, 21 bp, Artificial Sequence
  Description of Artificial Sequence: Synthetic oligonucleotide
agatacaacgaagacgaagca

SEQ ID NO: 38200 - DNA, 21 bp, Artificial Sequence
  Description of Artificial Sequence: Synthetic oligonucleotide
agatacaacgaaacagtcagc

SEQ ID NO: 38201 - DNA, 21 bp, Artificial Sequence
  Description of Artificial Sequence: Synthetic oligonucleotide
agatacaacaaccaagtccca

SEQ ID NO: 38202 - DNA, 21 bp, Artificial Sequence
  Description of Artificial Sequence: Synthetic oligonucleotide
agatacaacacagcaatcagc

SEQ ID NO: 38203 - DNA, 21 bp, Artificial Sequence
  Description of Artificial Sequence: Synthetic oligonucleotide
agatacccaagccaaacaagc

SEQ ID NO: 38204 - DNA, 21 bp, Artificial Sequence
  Description of Artificial Sequence: Synthetic oligonucleotide
agatacagcaacaacctccca

SEQ ID NO: 38205 - DNA, 21 bp, Artificial Sequence
  Description of Artificial Sequence: Synthetic oligonucleotide
agatacagcccaggaagccca

SEQ ID NO: 38206 - DNA, 21 bp, Artificial Sequence
  Description of Artificial Sequence: Synthetic oligonucleotide
agatacacagtcgcagacgca

SEQ ID NO: 38207 - DNA, 21 bp, Artificial Sequence
  Description of Artificial Sequence: Synthetic oligonucleotide
agatacgtcgacccactcatg

SEQ ID NO: 38208 - DNA, 21 bp, Artificial Sequence
  Description of Artificial Sequence: Synthetic oligonucleotide
agcgcagcacacatcgacctc

SEQ ID NO: 38209 - DNA, 21 bp, Artificial Sequence
  Description of Artificial Sequence: Synthetic oligonucleotide
agcgcagcactcctcgaacca

SEQ ID NO: 38210 - DNA, 21 bp, Artificial Sequence
  Description of Artificial Sequence: Synthetic oligonucleotide
agcgcagcactcagagaagga

SEQ ID NO: 38211 - DNA, 21 bp, Artificial Sequence
  Description of Artificial Sequence: Synthetic oligonucleotide
agcgcagcaagagacacagac

SEQ ID NO: 38212 - DNA, 21 bp, Artificial Sequence
  Description of Artificial Sequence: Synthetic oligonucleotide
agcgcagcaagaatgacagca

SEQ ID NO: 38213 - DNA, 21 bp, Artificial Sequence
  Description of Artificial Sequence: Synthetic oligonucleotide
agcgcagcaagcggacaccac

SEQ ID NO: 38214 - DNA, 21 bp, Artificial Sequence
  Description of Artificial Sequence: Synthetic oligonucleotide
agcgcagcaagcaaactcctc

SEQ ID NO: 38215 - DNA, 21 bp, Artificial Sequence
  Description of Artificial Sequence: Synthetic oligonucleotide
agcgcagcaagcagcatgaga

SEQ ID NO: 38216 - DNA, 21 bp, Artificial Sequence
  Description of Artificial Sequence: Synthetic oligonucleotide
agcgcagcaagcacagtcttc

SEQ ID NO: 38217 - DNA, 21 bp, Artificial Sequence
  Description of Artificial Sequence: Synthetic oligonucleotide
agcgcagcatacgacccaaaa

SEQ ID NO: 38218 - DNA, 21 bp, Artificial Sequence
  Description of Artificial Sequence: Synthetic oligonucleotide
agcgcagacttccaaagagga

SEQ ID NO: 38219 - DNA, 21 bp, Artificial Sequence
  Description of Artificial Sequence: Synthetic oligonucleotide
agcgcagacacaatgctcatc

SEQ ID NO: 38220 - DNA, 21 bp, Artificial Sequence
  Description of Artificial Sequence: Synthetic oligonucleotide
agcgcagaagcacacatcaca

SEQ ID NO: 38221 - DNA, 21 bp, Artificial Sequence
  Description of Artificial Sequence: Synthetic oligonucleotide
agcgcagaaatcgaattcctc

SEQ ID NO: 38222 - DNA, 21 bp, Artificial Sequence
  Description of Artificial Sequence: Synthetic oligonucleotide
agcgcagaaagcgtcccacac

SEQ ID NO: 38223 - DNA, 21 bp, Artificial Sequence
  Description of Artificial Sequence: Synthetic oligonucleotide
agcgcagaatacagaagcgtc

SEQ ID NO: 38224 - DNA, 21 bp, Artificial Sequence
  Description of Artificial Sequence: Synthetic oligonucleotide
agcgcattcggacaacacgga

SEQ ID NO: 38225 - DNA, 21 bp, Artificial Sequence
  Description of Artificial Sequence: Synthetic oligonucleotide
agcgcattcctcccacacgca

SEQ ID NO: 38226 - DNA, 21 bp, Artificial Sequence
  Description of Artificial Sequence: Synthetic oligonucleotide
agcgcattcctcccaacacca

SEQ ID NO: 38227 - DNA, 21 bp, Artificial Sequence
  Description of Artificial Sequence: Synthetic oligonucleotide
agcgcattcagcgcaggagca

SEQ ID NO: 38228 - DNA, 21 bp, Artificial Sequence
  Description of Artificial Sequence: Synthetic oligonucleotide
agcgcattcacaaactaccca

SEQ ID NO: 38229 - DNA, 21 bp, Artificial Sequence
  Description of Artificial Sequence: Synthetic oligonucleotide
agcgcaggagaaagaagcctc

SEQ ID NO: 38230 - DNA, 21 bp, Artificial Sequence
  Description of Artificial Sequence: Synthetic oligonucleotide
agcgcaggaggagaaagaaca

SEQ ID NO: 38231 - DNA, 21 bp, Artificial Sequence
  Description of Artificial Sequence: Synthetic oligonucleotide
agcgcaggaggaggaatgaac

SEQ ID NO: 38232 - DNA, 21 bp, Artificial Sequence
  Description of Artificial Sequence: Synthetic oligonucleotide
agcgcaggaaaactcccaatg

SEQ ID NO: 38233 - DNA, 21 bp, Artificial Sequence
  Description of Artificial Sequence: Synthetic oligonucleotide
agcgcaggactccacgcagtc

SEQ ID NO: 38234 - DNA, 21 bp, Artificial Sequence
  Description of Artificial Sequence: Synthetic oligonucleotide
agcgcaggaccagcaccaaga

SEQ ID NO: 38235 - DNA, 21 bp, Artificial Sequence
  Description of Artificial Sequence: Synthetic oligonucleotide
agcgcaggacaaagccaaaga

SEQ ID NO: 38236 - DNA, 21 bp, Artificial Sequence
  Description of Artificial Sequence: Synthetic oligonucleotide
agcgcaggaagattcgaaaca

SEQ ID NO: 38237 - DNA, 21 bp, Artificial Sequence
  Description of Artificial Sequence: Synthetic oligonucleotide
agcgcaggaacagcaatgatc

SEQ ID NO: 38238 - DNA, 21 bp, Artificial Sequence
  Description of Artificial Sequence: Synthetic oligonucleotide
agcgcaggagtccacaaaagc

SEQ ID NO: 38239 - DNA, 21 bp, Artificial Sequence
  Description of Artificial Sequence: Synthetic oligonucleotide
agcgcacactgcccaacacca

SEQ ID NO: 38240 - DNA, 21 bp, Artificial Sequence
  Description of Artificial Sequence: Synthetic oligonucleotide
agcgcacaccacagccacatg

SEQ ID NO: 38241 - DNA, 21 bp, Artificial Sequence
  Description of Artificial Sequence: Synthetic oligonucleotide
agcgcacacatgagcagagca

SEQ ID NO: 38242 - DNA, 21 bp, Artificial Sequence
  Description of Artificial Sequence: Synthetic oligonucleotide
agcgcacaccaactccaaaca

SEQ ID NO: 38243 - DNA, 21 bp, Artificial Sequence
  Description of Artificial Sequence: Synthetic oligonucleotide
agcgcacacagcccacaaatg

SEQ ID NO: 38244 - DNA, 21 bp, Artificial Sequence
  Description of Artificial Sequence: Synthetic oligonucleotide
agcgcacacagcacaccacac

SEQ ID NO: 38245 - DNA, 21 bp, Artificial Sequence
  Description of Artificial Sequence: Synthetic oligonucleotide
agcgcaatctgccaaagcgtc

SEQ ID NO: 38246 - DNA, 21 bp, Artificial Sequence
  Description of Artificial Sequence: Synthetic oligonucleotide
agcgcaatcatgccaagccca

SEQ ID NO: 38247 - DNA, 21 bp, Artificial Sequence
  Description of Artificial Sequence: Synthetic oligonucleotide
agcgcaatcatgagcagaagc

SEQ ID NO: 38248 - DNA, 21 bp, Artificial Sequence
  Description of Artificial Sequence: Synthetic oligonucleotide
agcgcaatcaacagactccca

SEQ ID NO: 38249 - DNA, 21 bp, Artificial Sequence
  Description of Artificial Sequence: Synthetic oligonucleotide
agcgcaatcagcagcatgagc

SEQ ID NO: 38250 - DNA, 21 bp, Artificial Sequence
  Description of Artificial Sequence: Synthetic oligonucleotide
agcgcaaaatgcgtccaagca

SEQ ID NO: 38251 - DNA, 21 bp, Artificial Sequence
  Description of Artificial Sequence: Synthetic oligonucleotide
agcgcaaaacacagcgcaatg

SEQ ID NO: 38252 - DNA, 21 bp, Artificial Sequence
  Description of Artificial Sequence: Synthetic oligonucleotide
agcgcaaaaagcgcattcagc

SEQ ID NO: 38253 - DNA, 21 bp, Artificial Sequence
  Description of Artificial Sequence: Synthetic oligonucleotide
agcgcaaaaagcatggtcgtc

SEQ ID NO: 38254 - DNA, 21 bp, Artificial Sequence
  Description of Artificial Sequence: Synthetic oligonucleotide
agcgcaaaaacaatgatccca

SEQ ID NO: 38255 - DNA, 21 bp, Artificial Sequence
  Description of Artificial Sequence: Synthetic oligonucleotide
agcgcaaaaacaagcgaaagc

SEQ ID NO: 38256 - DNA, 21 bp, Artificial Sequence
  Description of Artificial Sequence: Synthetic oligonucleotide
agcgcactcgcaggactcagc

SEQ ID NO: 38257 - DNA, 21 bp, Artificial Sequence
  Description of Artificial Sequence: Synthetic oligonucleotide
agcgcactcgacctcaaccac

SEQ ID NO: 38258 - DNA, 21 bp, Artificial Sequence
  Description of Artificial Sequence: Synthetic oligonucleotide
agcgcactcgacaacatcaga

SEQ ID NO: 38259 - DNA, 21 bp, Artificial Sequence
  Description of Artificial Sequence: Synthetic oligonucleotide
agcgcactcggactcagcgtc

SEQ ID NO: 38260 - DNA, 21 bp, Artificial Sequence
  Description of Artificial Sequence: Synthetic oligonucleotide
agcgcactcggaagcagagtc

SEQ ID NO: 38261 - DNA, 21 bp, Artificial Sequence
  Description of Artificial Sequence: Synthetic oligonucleotide
agcgcactccacctcgcagca

SEQ ID NO: 38262 - DNA, 21 bp, Artificial Sequence
  Description of Artificial Sequence: Synthetic oligonucleotide
agcgcactcaaaacagacagc

SEQ ID NO: 38263 - DNA, 21 bp, Artificial Sequence
  Description of Artificial Sequence: Synthetic oligonucleotide
agcgcactcaacaaaagaatc

SEQ ID NO: 38264 - DNA, 21 bp, Artificial Sequence
  Description of Artificial Sequence: Synthetic oligonucleotide
agcgcactcccaaaaccagaa

SEQ ID NO: 38265 - DNA, 21 bp, Artificial Sequence
  Description of Artificial Sequence: Synthetic oligonucleotide
agcgcactcagactcgtcagc

SEQ ID NO: 38266 - DNA, 21 bp, Artificial Sequence
  Description of Artificial Sequence: Synthetic oligonucleotide
agcgcactcagaccagacagc

SEQ ID NO: 38267 - DNA, 21 bp, Artificial Sequence
  Description of Artificial Sequence: Synthetic oligonucleotide
agcgcactcagaagcgtcaca

SEQ ID NO: 38268 - DNA, 21 bp, Artificial Sequence
  Description of Artificial Sequence: Synthetic oligonucleotide
agcgcactcagagtcccagca

SEQ ID NO: 38269 - DNA, 21 bp, Artificial Sequence
  Description of Artificial Sequence: Synthetic oligonucleotide
agcgcactcagcacaacagga

SEQ ID NO: 38270 - DNA, 21 bp, Artificial Sequence
  Description of Artificial Sequence: Synthetic oligonucleotide
agcgcactcacagacaaactc

SEQ ID NO: 38271 - DNA, 21 bp, Artificial Sequence
  Description of Artificial Sequence: Synthetic oligonucleotide
agcgcactcacacacgtcagc

SEQ ID NO: 38272 - DNA, 21 bp, Artificial Sequence
  Description of Artificial Sequence: Synthetic oligonucleotide
agcgcactcacaagcagcctc

SEQ ID NO: 38273 - DNA, 21 bp, Artificial Sequence
  Description of Artificial Sequence: Synthetic oligonucleotide
agcgcaatgcacccaatgctc

SEQ ID NO: 38274 - DNA, 21 bp, Artificial Sequence
  Description of Artificial Sequence: Synthetic oligonucleotide
agcgcaatgaaacacccaagc

SEQ ID NO: 38275 - DNA, 21 bp, Artificial Sequence
  Description of Artificial Sequence: Synthetic oligonucleotide
agcgcaatgagaccaggaagc

SEQ ID NO: 38276 - DNA, 21 bp, Artificial Sequence
  Description of Artificial Sequence: Synthetic oligonucleotide
agcgcaatgacaaaaaacctc

SEQ ID NO: 38277 - DNA, 21 bp, Artificial Sequence
  Description of Artificial Sequence: Synthetic oligonucleotide
agcgcaaacggaagcagcagc

SEQ ID NO: 38278 - DNA, 21 bp, Artificial Sequence
  Description of Artificial Sequence: Synthetic oligonucleotide
agcgcaaacatcacagtcaaa

SEQ ID NO: 38279 - DNA, 21 bp, Artificial Sequence
  Description of Artificial Sequence: Synthetic oligonucleotide
agcgcaaacccacacatcaca

SEQ ID NO: 38280 - DNA, 21 bp, Artificial Sequence
  Description of Artificial Sequence: Synthetic oligonucleotide
agcgcaaacagcctcccagca

SEQ ID NO: 38281 - DNA, 21 bp, Artificial Sequence
  Description of Artificial Sequence: Synthetic oligonucleotide
agcgcaaacacagcaagaagc

SEQ ID NO: 38282 - DNA, 21 bp, Artificial Sequence
  Description of Artificial Sequence: Synthetic oligonucleotide
agcgcaccagaatggatgcca

SEQ ID NO: 38283 - DNA, 21 bp, Artificial Sequence
  Description of Artificial Sequence: Synthetic oligonucleotide
agcgcaccattcgcaacagaa

SEQ ID NO: 38284 - DNA, 21 bp, Artificial Sequence
  Description of Artificial Sequence: Synthetic oligonucleotide
agcgcaccaggagcaagcttc

SEQ ID NO: 38285 - DNA, 21 bp, Artificial Sequence
  Description of Artificial Sequence: Synthetic oligonucleotide
agcgcaccacacacacacctc

SEQ ID NO: 38286 - DNA, 21 bp, Artificial Sequence
  Description of Artificial Sequence: Synthetic oligonucleotide
agcgcaccacacacaatccca

SEQ ID NO: 38287 - DNA, 21 bp, Artificial Sequence
  Description of Artificial Sequence: Synthetic oligonucleotide
agcgcaccactcatcggaagc

SEQ ID NO: 38288 - DNA, 21 bp, Artificial Sequence
  Description of Artificial Sequence: Synthetic oligonucleotide
agcgcaccaatgacatgcgca

SEQ ID NO: 38289 - DNA, 21 bp, Artificial Sequence
  Description of Artificial Sequence: Synthetic oligonucleotide
agcgcaccaaacagcagcagc

SEQ ID NO: 38290 - DNA, 21 bp, Artificial Sequence
  Description of Artificial Sequence: Synthetic oligonucleotide
agcgcaccagtcagaagccca

SEQ ID NO: 38291 - DNA, 21 bp, Artificial Sequence
  Description of Artificial Sequence: Synthetic oligonucleotide
agcgcacaaggagcaagacca

SEQ ID NO: 38292 - DNA, 21 bp, Artificial Sequence
  Description of Artificial Sequence: Synthetic oligonucleotide
agcgcacaactcagcctccca

SEQ ID NO: 38293 - DNA, 21 bp, Artificial Sequence
  Description of Artificial Sequence: Synthetic oligonucleotide
agcgcaagagacgcacacagc

SEQ ID NO: 38294 - DNA, 21 bp, Artificial Sequence
  Description of Artificial Sequence: Synthetic oligonucleotide
agcgcaagagaccacagacca

SEQ ID NO: 38295 - DNA, 21 bp, Artificial Sequence
  Description of Artificial Sequence: Synthetic oligonucleotide
agcgcaagaggaagcgaccca

SEQ ID NO: 38296 - DNA, 21 bp, Artificial Sequence
  Description of Artificial Sequence: Synthetic oligonucleotide
agcgcaagaggagtcgcaaca

SEQ ID NO: 38297 - DNA, 21 bp, Artificial Sequence
  Description of Artificial Sequence: Synthetic oligonucleotide
agcgcaagaatcttcaaagac

SEQ ID NO: 38298 - DNA, 21 bp, Artificial Sequence
  Description of Artificial Sequence: Synthetic oligonucleotide
agcgcaagaatggcactcgga

SEQ ID NO: 38299 - DNA, 21 bp, Artificial Sequence
  Description of Artificial Sequence: Synthetic oligonucleotide
agcgcaagacaagtcagcgga

SEQ ID NO: 38300 - DNA, 21 bp, Artificial Sequence
  Description of Artificial Sequence: Synthetic oligonucleotide
agcgcaagaagcgacccagca

SEQ ID NO: 38301 - DNA, 21 bp, Artificial Sequence
  Description of Artificial Sequence: Synthetic oligonucleotide
agcgcaagaacagcaggacca

SEQ ID NO: 38302 - DNA, 21 bp, Artificial Sequence
  Description of Artificial Sequence: Synthetic oligonucleotide
agcgcaagaacagacagaaca

SEQ ID NO: 38303 - DNA, 21 bp, Artificial Sequence
  Description of Artificial Sequence: Synthetic oligonucleotide
agcgcaagaacagtcgacatg

SEQ ID NO: 38304 - DNA, 21 bp, Artificial Sequence
  Description of Artificial Sequence: Synthetic oligonucleotide
agcgcaagagtcttcccagca

SEQ ID NO: 38305 - DNA, 21 bp, Artificial Sequence
  Description of Artificial Sequence: Synthetic oligonucleotide
agcgcaagagtcaacatcgga

SEQ ID NO: 38306 - DNA, 21 bp, Artificial Sequence
  Description of Artificial Sequence: Synthetic oligonucleotide
agcgcaagagtcagcaacagc

SEQ ID NO: 38307 - DNA, 21 bp, Artificial Sequence
  Description of Artificial Sequence: Synthetic oligonucleotide
agcgcaagcgcactcgtcctc

SEQ ID NO: 38308 - DNA, 21 bp, Artificial Sequence
  Description of Artificial Sequence: Synthetic oligonucleotide
agcgcaagcgaaagattcaga

SEQ ID NO: 38309 - DNA, 21 bp, Artificial Sequence
  Description of Artificial Sequence: Synthetic oligonucleotide
agcgcaagcgaaagcagcatg

SEQ ID NO: 38310 - DNA, 21 bp, Artificial Sequence
  Description of Artificial Sequence: Synthetic oligonucleotide
agcgcaagcatccaagtcatg

SEQ ID NO: 38311 - DNA, 21 bp, Artificial Sequence
  Description of Artificial Sequence: Synthetic oligonucleotide
agcgcaagcaaaccaacaagc

SEQ ID NO: 38312 - DNA, 21 bp, Artificial Sequence
  Description of Artificial Sequence: Synthetic oligonucleotide
agcgcaagcctcagactccca

SEQ ID NO: 38313 - DNA, 21 bp, Artificial Sequence
  Description of Artificial Sequence: Synthetic oligonucleotide
agcgcaagcatgagagcactc

SEQ ID NO: 38314 - DNA, 21 bp, Artificial Sequence
  Description of Artificial Sequence: Synthetic oligonucleotide
agcgcaagcaacagcgtcgga

SEQ ID NO: 38315 - DNA, 21 bp, Artificial Sequence
  Description of Artificial Sequence: Synthetic oligonucleotide
agcgcaagcccagcaggacac

SEQ ID NO: 38316 - DNA, 21 bp, Artificial Sequence
  Description of Artificial Sequence: Synthetic oligonucleotide
agcgcaagcccacaaagaaca

SEQ ID NO: 38317 - DNA, 21 bp, Artificial Sequence
  Description of Artificial Sequence: Synthetic oligonucleotide
agcgcaagcagacaaatccca

SEQ ID NO: 38318 - DNA, 21 bp, Artificial Sequence
  Description of Artificial Sequence: Synthetic oligonucleotide
agcgcaagcagcgcagcacaa

SEQ ID NO: 38319 - DNA, 21 bp, Artificial Sequence
  Description of Artificial Sequence: Synthetic oligonucleotide
agcgcaagcagcaaaacagga

SEQ ID NO: 38320 - DNA, 21 bp, Artificial Sequence
  Description of Artificial Sequence: Synthetic oligonucleotide
agcgcaagcacaccaaaacac

SEQ ID NO: 38321 - DNA, 21 bp, Artificial Sequence
  Description of Artificial Sequence: Synthetic oligonucleotide
agcgcaagcacacaaatcagc

SEQ ID NO: 38322 - DNA, 21 bp, Artificial Sequence
  Description of Artificial Sequence: Synthetic oligonucleotide
agcgcaagcgtcagaggaaac

SEQ ID NO: 38323 - DNA, 21 bp, Artificial Sequence
  Description of Artificial Sequence: Synthetic oligonucleotide
agcgcaagcgtcacatacagc

SEQ ID NO: 38324 - DNA, 21 bp, Artificial Sequence
  Description of Artificial Sequence: Synthetic oligonucleotide
agcgcaacattcgacacaaca

SEQ ID NO: 38325 - DNA, 21 bp, Artificial Sequence
  Description of Artificial Sequence: Synthetic oligonucleotide
agcgcaacactcagcgcactc

SEQ ID NO: 38326 - DNA, 21 bp, Artificial Sequence
  Description of Artificial Sequence: Synthetic oligonucleotide
agcgcaacaccacacagagca

SEQ ID NO: 38327 - DNA, 21 bp, Artificial Sequence
  Description of Artificial Sequence: Synthetic oligonucleotide
agcgcaacaccaatcagcaga

SEQ ID NO: 38328 - DNA, 21 bp, Artificial Sequence
  Description of Artificial Sequence: Synthetic oligonucleotide
agcgcaacacaacacacagga

SEQ ID NO: 38329 - DNA, 21 bp, Artificial Sequence
  Description of Artificial Sequence: Synthetic oligonucleotide
agcgcaacacaaagaatcgtc

SEQ ID NO: 38330 - DNA, 21 bp, Artificial Sequence
  Description of Artificial Sequence: Synthetic oligonucleotide
agcgcaacaagcccagacaga

SEQ ID NO: 38331 - DNA, 21 bp, Artificial Sequence
  Description of Artificial Sequence: Synthetic oligonucleotide
agcgcaacagtcccaagacca

SEQ ID NO: 38332 - DNA, 21 bp, Artificial Sequence
  Description of Artificial Sequence: Synthetic oligonucleotide
agcgcagtcgcaatcctcaca

SEQ ID NO: 38333 - DNA, 21 bp, Artificial Sequence
  Description of Artificial Sequence: Synthetic oligonucleotide
agcgcagtcggagcacacagc

SEQ ID NO: 38334 - DNA, 21 bp, Artificial Sequence
  Description of Artificial Sequence: Synthetic oligonucleotide
agcgcagtcggaaacgcaaga

SEQ ID NO: 38335 - DNA, 21 bp, Artificial Sequence
  Description of Artificial Sequence: Synthetic oligonucleotide
agcgcagtcggaagaagcaca

SEQ ID NO: 38336 - DNA, 21 bp, Artificial Sequence
  Description of Artificial Sequence: Synthetic oligonucleotide
agcgcagtcggaacaagctac

SEQ ID NO: 38337 - DNA, 21 bp, Artificial Sequence
  Description of Artificial Sequence: Synthetic oligonucleotide
agcgcagtccacagaatggac

SEQ ID NO: 38338 - DNA, 21 bp, Artificial Sequence
  Description of Artificial Sequence: Synthetic oligonucleotide
agcgcagtcatcagagcaagc

SEQ ID NO: 38339 - DNA, 21 bp, Artificial Sequence
  Description of Artificial Sequence: Synthetic oligonucleotide
agcgcagtcctcccacaaaga

SEQ ID NO: 38340 - DNA, 21 bp, Artificial Sequence
  Description of Artificial Sequence: Synthetic oligonucleotide
agcgcagtcaacgaagcaaga

SEQ ID NO: 38341 - DNA, 21 bp, Artificial Sequence
  Description of Artificial Sequence: Synthetic oligonucleotide
agcgcagtcaacagcagaatg

SEQ ID NO: 38342 - DNA, 21 bp, Artificial Sequence
  Description of Artificial Sequence: Synthetic oligonucleotide
agcgcagtcagaatggcaaca

SEQ ID NO: 38343 - DNA, 21 bp, Artificial Sequence
  Description of Artificial Sequence: Synthetic oligonucleotide
agcgcagtcagaccactccca

SEQ ID NO: 38344 - DNA, 21 bp, Artificial Sequence
  Description of Artificial Sequence: Synthetic oligonucleotide
agcgcagtcacaggagcatgg

SEQ ID NO: 38345 - DNA, 21 bp, Artificial Sequence
  Description of Artificial Sequence: Synthetic oligonucleotide
agcgcagtcacaagccacatg

SEQ ID NO: 38346 - DNA, 21 bp, Artificial Sequence
  Description of Artificial Sequence: Synthetic oligonucleotide
agcgcagtctaccaaggacac

SEQ ID NO: 38347 - DNA, 21 bp, Artificial Sequence
  Description of Artificial Sequence: Synthetic oligonucleotide
agcgcatggagcagcacagga

SEQ ID NO: 38348 - DNA, 21 bp, Artificial Sequence
  Description of Artificial Sequence: Synthetic oligonucleotide
agcgcatacgcaagcagcagc

SEQ ID NO: 38349 - DNA, 21 bp, Artificial Sequence
  Description of Artificial Sequence: Synthetic oligonucleotide
agcgcataccaaaacatggca

SEQ ID NO: 38350 - DNA, 21 bp, Artificial Sequence
  Description of Artificial Sequence: Synthetic oligonucleotide
agcgcatacgtcgacacaaga

SEQ ID NO: 38351 - DNA, 21 bp, Artificial Sequence
  Description of Artificial Sequence: Synthetic oligonucleotide
agctgcgaactcctcccagca

SEQ ID NO: 38352 - DNA, 21 bp, Artificial Sequence
  Description of Artificial Sequence: Synthetic oligonucleotide
agctgcctcaacggagtccca

SEQ ID NO: 38353 - DNA, 21 bp, Artificial Sequence
  Description of Artificial Sequence: Synthetic oligonucleotide
agcgacgcaatgacaatcgca

SEQ ID NO: 38354 - DNA, 21 bp, Artificial Sequence
  Description of Artificial Sequence: Synthetic oligonucleotide
agcgacgcaaacggaagcagc

SEQ ID NO: 38355 - DNA, 21 bp, Artificial Sequence
  Description of Artificial Sequence: Synthetic oligonucleotide
agcgacgcaaacgtcggaatg

SEQ ID NO: 38356 - DNA, 21 bp, Artificial Sequence
  Description of Artificial Sequence: Synthetic oligonucleotide
agcgacgcaccaccatacaga

SEQ ID NO: 38357 - DNA, 21 bp, Artificial Sequence
  Description of Artificial Sequence: Synthetic oligonucleotide
agcgactgcatcacacacagc

SEQ ID NO: 38358 - DNA, 21 bp, Artificial Sequence
  Description of Artificial Sequence: Synthetic oligonucleotide
agcgacgacggaccaagcgca

SEQ ID NO: 38359 - DNA, 21 bp, Artificial Sequence
  Description of Artificial Sequence: Synthetic oligonucleotide
agcgacgacctcgtcccaaaa

SEQ ID NO: 38360 - DNA, 21 bp, Artificial Sequence
  Description of Artificial Sequence: Synthetic oligonucleotide
agcgacgacagagaaaactgc

SEQ ID NO: 38361 - DNA, 21 bp, Artificial Sequence
  Description of Artificial Sequence: Synthetic oligonucleotide
agcgacgacagcaaaaacaca

SEQ ID NO: 38362 - DNA, 21 bp, Artificial Sequence
  Description of Artificial Sequence: Synthetic oligonucleotide
agcgacgaaagcggaatgcca

SEQ ID NO: 38363 - DNA, 21 bp, Artificial Sequence
  Description of Artificial Sequence: Synthetic oligonucleotide
agcgacggaccaagactcagc

SEQ ID NO: 38364 - DNA, 21 bp, Artificial Sequence
  Description of Artificial Sequence: Synthetic oligonucleotide
agcgacggaagcagcctcgca

SEQ ID NO: 38365 - DNA, 21 bp, Artificial Sequence
  Description of Artificial Sequence: Synthetic oligonucleotide
agcgaccacagatacctcatc

SEQ ID NO: 38366 - DNA, 21 bp, Artificial Sequence
  Description of Artificial Sequence: Synthetic oligonucleotide
agcgaccacagcagcagaaca

SEQ ID NO: 38367 - DNA, 21 bp, Artificial Sequence
  Description of Artificial Sequence: Synthetic oligonucleotide
agcgacatcccaagaccaagc

SEQ ID NO: 38368 - DNA, 21 bp, Artificial Sequence
  Description of Artificial Sequence: Synthetic oligonucleotide
agcgacatcgtcgcaagccca

SEQ ID NO: 38369 - DNA, 21 bp, Artificial Sequence
  Description of Artificial Sequence: Synthetic oligonucleotide
agcgacaaattcttcccaagc

SEQ ID NO: 38370 - DNA, 21 bp, Artificial Sequence
  Description of Artificial Sequence: Synthetic oligonucleotide
agcgacctcaacaaactcgca

SEQ ID NO: 38371 - DNA, 21 bp, Artificial Sequence
  Description of Artificial Sequence: Synthetic oligonucleotide
agcgacctcccaatgctcgtc

SEQ ID NO: 38372 - DNA, 21 bp, Artificial Sequence
  Description of Artificial Sequence: Synthetic oligonucleotide
agcgacctcagaatggtcgca

SEQ ID NO: 38373 - DNA, 21 bp, Artificial Sequence
  Description of Artificial Sequence: Synthetic oligonucleotide
agcgacctcagcagaccactc

SEQ ID NO: 38374 - DNA, 21 bp, Artificial Sequence
  Description of Artificial Sequence: Synthetic oligonucleotide
agcgacatggcaacaaaactc

SEQ ID NO: 38375 - DNA, 21 bp, Artificial Sequence
  Description of Artificial Sequence: Synthetic oligonucleotide
agcgacatgccagtcccaaga

SEQ ID NO: 38376 - DNA, 21 bp, Artificial Sequence
  Description of Artificial Sequence: Synthetic oligonucleotide
agcgacatgacagcaagagga

SEQ ID NO: 38377 - DNA, 21 bp, Artificial Sequence
  Description of Artificial Sequence: Synthetic oligonucleotide
agcgacaactacgaaagaaca

SEQ ID NO: 38378 - DNA, 21 bp, Artificial Sequence
  Description of Artificial Sequence: Synthetic oligonucleotide
agcgacccaggaagaggagca

SEQ ID NO: 38379 - DNA, 21 bp, Artificial Sequence
  Description of Artificial Sequence: Synthetic oligonucleotide
agcgacccaaaatacagcgtc

SEQ ID NO: 38380 - DNA, 21 bp, Artificial Sequence
  Description of Artificial Sequence: Synthetic oligonucleotide
agcgacccaaacacatacatc

SEQ ID NO: 38381 - DNA, 21 bp, Artificial Sequence
  Description of Artificial Sequence: Synthetic oligonucleotide
agcgacccaagaagaacaagc

SEQ ID NO: 38382 - DNA, 21 bp, Artificial Sequence
  Description of Artificial Sequence: Synthetic oligonucleotide
agcgacccaagcctcccagtc

SEQ ID NO: 38383 - DNA, 21 bp, Artificial Sequence
  Description of Artificial Sequence: Synthetic oligonucleotide
agcgacccagtcctcggagca

SEQ ID NO: 38384 - DNA, 21 bp, Artificial Sequence
  Description of Artificial Sequence: Synthetic oligonucleotide
agcgaccaaccaacaaaagca

SEQ ID NO: 38385 - DNA, 21 bp, Artificial Sequence
  Description of Artificial Sequence: Synthetic oligonucleotide
agcgaccaaagaatcctccca

SEQ ID NO: 38386 - DNA, 21 bp, Artificial Sequence
  Description of Artificial Sequence: Synthetic oligonucleotide
agcgaccaaagcctcacatac

SEQ ID NO: 38387 - DNA, 21 bp, Artificial Sequence
  Description of Artificial Sequence: Synthetic oligonucleotide
agcgaccaagtcaaaagcagc

SEQ ID NO: 38388 - DNA, 21 bp, Artificial Sequence
  Description of Artificial Sequence: Synthetic oligonucleotide
agcgacagagaaagcagaatc

SEQ ID NO: 38389 - DNA, 21 bp, Artificial Sequence
  Description of Artificial Sequence: Synthetic oligonucleotide
agcgacagagaagtcgaccca

SEQ ID NO: 38390 - DNA, 21 bp, Artificial Sequence
  Description of Artificial Sequence: Synthetic oligonucleotide
agcgacagaggaatcagagac

SEQ ID NO: 38391 - DNA, 21 bp, Artificial Sequence
  Description of Artificial Sequence: Synthetic oligonucleotide
agcgacagaggatacccaaaa

SEQ ID NO: 38392 - DNA, 21 bp, Artificial Sequence
  Description of Artificial Sequence: Synthetic oligonucleotide
agcgacagactctgcgacgaa

SEQ ID NO: 38393 - DNA, 21 bp, Artificial Sequence
  Description of Artificial Sequence: Synthetic oligonucleotide
agcgacagactccaaacagtc

SEQ ID NO: 38394 - DNA, 21 bp, Artificial Sequence
  Description of Artificial Sequence: Synthetic oligonucleotide
agcgacagaatgatgacattc

SEQ ID NO: 38395 - DNA, 21 bp, Artificial Sequence
  Description of Artificial Sequence: Synthetic oligonucleotide
agcgacagaatgagcagccca

SEQ ID NO: 38396 - DNA, 21 bp, Artificial Sequence
  Description of Artificial Sequence: Synthetic oligonucleotide
agcgacagaccagcactcctc

SEQ ID NO: 38397 - DNA, 21 bp, Artificial Sequence
  Description of Artificial Sequence: Synthetic oligonucleotide
agcgacagaccaggactctac

SEQ ID NO: 38398 - DNA, 21 bp, Artificial Sequence
  Description of Artificial Sequence: Synthetic oligonucleotide
agcgacagacaaccattcaca

SEQ ID NO: 38399 - DNA, 21 bp, Artificial Sequence
  Description of Artificial Sequence: Synthetic oligonucleotide
agcgacagaagagcaatgagc

SEQ ID NO: 38400 - DNA, 21 bp, Artificial Sequence
  Description of Artificial Sequence: Synthetic oligonucleotide
agcgacagaagaaacatggca

SEQ ID NO: 38401 - DNA, 21 bp, Artificial Sequence
  Description of Artificial Sequence: Synthetic oligonucleotide
agcgacagaagcgcaacaagc

SEQ ID NO: 38402 - DNA, 21 bp, Artificial Sequence
  Description of Artificial Sequence: Synthetic oligonucleotide
agcgacagaagcgacaaacca

SEQ ID NO: 38403 - DNA, 21 bp, Artificial Sequence
  Description of Artificial Sequence: Synthetic oligonucleotide
agcgacagcgcacacgcacca

SEQ ID NO: 38404 - DNA, 21 bp, Artificial Sequence
  Description of Artificial Sequence: Synthetic oligonucleotide
agcgacagcggacaaagcgca

SEQ ID NO: 38405 - DNA, 21 bp, Artificial Sequence
  Description of Artificial Sequence: Synthetic oligonucleotide
agcgacagcaaagtcggacca

SEQ ID NO: 38406 - DNA, 21 bp, Artificial Sequence
  Description of Artificial Sequence: Synthetic oligonucleotide
agcgacagcagactcggagca

SEQ ID NO: 38407 - DNA, 21 bp, Artificial Sequence
  Description of Artificial Sequence: Synthetic oligonucleotide
agcgacagcagaagagaatac

SEQ ID NO: 38408 - DNA, 21 bp, Artificial Sequence
  Description of Artificial Sequence: Synthetic oligonucleotide
agcgacagctacggaagcaga

SEQ ID NO: 38409 - DNA, 21 bp, Artificial Sequence
  Description of Artificial Sequence: Synthetic oligonucleotide
agcgacagctacccaagaatc

SEQ ID NO: 38410 - DNA, 21 bp, Artificial Sequence
  Description of Artificial Sequence: Synthetic oligonucleotide
agcgacacaaaactctaccca

SEQ ID NO: 38411 - DNA, 21 bp, Artificial Sequence
  Description of Artificial Sequence: Synthetic oligonucleotide
agcgacacaatgagagcagaa

SEQ ID NO: 38412 - DNA, 21 bp, Artificial Sequence
  Description of Artificial Sequence: Synthetic oligonucleotide
agcgacacaagactcacaaga

SEQ ID NO: 38413 - DNA, 21 bp, Artificial Sequence
  Description of Artificial Sequence: Synthetic oligonucleotide
agcgacacaagaaacggagca

SEQ ID NO: 38414 - DNA, 21 bp, Artificial Sequence
  Description of Artificial Sequence: Synthetic oligonucleotide
agcgacacaacactcctcgac

SEQ ID NO: 38415 - DNA, 21 bp, Artificial Sequence
  Description of Artificial Sequence: Synthetic oligonucleotide
agcgacacatacatgagactc

SEQ ID NO: 38416 - DNA, 21 bp, Artificial Sequence
  Description of Artificial Sequence: Synthetic oligonucleotide
agcgacgtcgcagcaagaagc

SEQ ID NO: 38417 - DNA, 21 bp, Artificial Sequence
  Description of Artificial Sequence: Synthetic oligonucleotide
agcgacgtcgcaatgagagca

SEQ ID NO: 38418 - DNA, 21 bp, Artificial Sequence
  Description of Artificial Sequence: Synthetic oligonucleotide
agcgacgtcaaccaaggactc

SEQ ID NO: 38419 - DNA, 21 bp, Artificial Sequence
  Description of Artificial Sequence: Synthetic oligonucleotide
agcgaagcattcagaccagca

SEQ ID NO: 38420 - DNA, 21 bp, Artificial Sequence
  Description of Artificial Sequence: Synthetic oligonucleotide
agcgaagcaccaaacgacaga

SEQ ID NO: 38421 - DNA, 21 bp, Artificial Sequence
  Description of Artificial Sequence: Synthetic oligonucleotide
agcgaagcaagcgcaagcaga

SEQ ID NO: 38422 - DNA, 21 bp, Artificial Sequence
  Description of Artificial Sequence: Synthetic oligonucleotide
agcgaagcatggctcgcaagc

SEQ ID NO: 38423 - DNA, 21 bp, Artificial Sequence
  Description of Artificial Sequence: Synthetic oligonucleotide
agcgaagacggagacatcaaa

SEQ ID NO: 38424 - DNA, 21 bp, Artificial Sequence
  Description of Artificial Sequence: Synthetic oligonucleotide
agcgaagacagaagcagaaca

SEQ ID NO: 38425 - DNA, 21 bp, Artificial Sequence
  Description of Artificial Sequence: Synthetic oligonucleotide
agcgaagaaagctggggatac

SEQ ID NO: 38426 - DNA, 21 bp, Artificial Sequence
  Description of Artificial Sequence: Synthetic oligonucleotide
agcgaattcgtcagaatgcca

SEQ ID NO: 38427 - DNA, 21 bp, Artificial Sequence
  Description of Artificial Sequence: Synthetic oligonucleotide
agcgaaggagaccacgcactc

SEQ ID NO: 38428 - DNA, 21 bp, Artificial Sequence
  Description of Artificial Sequence: Synthetic oligonucleotide
agcgaaggattcaacgcaatg

SEQ ID NO: 38429 - DNA, 21 bp, Artificial Sequence
  Description of Artificial Sequence: Synthetic oligonucleotide
agcgaaggacacagaggacca

SEQ ID NO: 38430 - DNA, 21 bp, Artificial Sequence
  Description of Artificial Sequence: Synthetic oligonucleotide
agcgaaggaacagtcagagaa

SEQ ID NO: 38431 - DNA, 21 bp, Artificial Sequence
  Description of Artificial Sequence: Synthetic oligonucleotide
agcgaaatccacagactccca

SEQ ID NO: 38432 - DNA, 21 bp, Artificial Sequence
  Description of Artificial Sequence: Synthetic oligonucleotide
agcgaaatcaacagaccagaa

SEQ ID NO: 38433 - DNA, 21 bp, Artificial Sequence
  Description of Artificial Sequence: Synthetic oligonucleotide
agcgaaatcacactcccactc

SEQ ID NO: 38434 - DNA, 21 bp, Artificial Sequence
  Description of Artificial Sequence: Synthetic oligonucleotide
agcgaaaaaagcaacgaaagc

SEQ ID NO: 38435 - DNA, 21 bp, Artificial Sequence
  Description of Artificial Sequence: Synthetic oligonucleotide
agcgaaaaatacgcagcaatg

SEQ ID NO: 38436 - DNA, 21 bp, Artificial Sequence
  Description of Artificial Sequence: Synthetic oligonucleotide
agcgaactcgaagcaagaaca

SEQ ID NO: 38437 - DNA, 21 bp, Artificial Sequence
  Description of Artificial Sequence: Synthetic oligonucleotide
agcgaactccacggactcctc

SEQ ID NO: 38438 - DNA, 21 bp, Artificial Sequence
  Description of Artificial Sequence: Synthetic oligonucleotide
agcgaactcaaaacaagacca

SEQ ID NO: 38439 - DNA, 21 bp, Artificial Sequence
  Description of Artificial Sequence: Synthetic oligonucleotide
agcgaactcagaagcgtcgga

SEQ ID NO: 38440 - DNA, 21 bp, Artificial Sequence
  Description of Artificial Sequence: Synthetic oligonucleotide
agcgaaatggacctcagaagc

SEQ ID NO: 38441 - DNA, 21 bp, Artificial Sequence
  Description of Artificial Sequence: Synthetic oligonucleotide
agcgaaaaccaaatgagaagc

SEQ ID NO: 38442 - DNA, 21 bp, Artificial Sequence
  Description of Artificial Sequence: Synthetic oligonucleotide
agcgaaaacacaagcgaccac

SEQ ID NO: 38443 - DNA, 21 bp, Artificial Sequence
  Description of Artificial Sequence: Synthetic oligonucleotide
agcgaaccaatcagaacagtc

SEQ ID NO: 38444 - DNA, 21 bp, Artificial Sequence
  Description of Artificial Sequence: Synthetic oligonucleotide
agcgaaccaagaagaacacca

SEQ ID NO: 38445 - DNA, 21 bp, Artificial Sequence
  Description of Artificial Sequence: Synthetic oligonucleotide
agcgaaccaagaagccaccca

SEQ ID NO: 38446 - DNA, 21 bp, Artificial Sequence
  Description of Artificial Sequence: Synthetic oligonucleotide
agcgaaccaagcgactacgtc

SEQ ID NO: 38447 - DNA, 21 bp, Artificial Sequence
  Description of Artificial Sequence: Synthetic oligonucleotide
agcgaaccaagcctcagcagc

SEQ ID NO: 38448 - DNA, 21 bp, Artificial Sequence
  Description of Artificial Sequence: Synthetic oligonucleotide
agcgaaccaacagcaagaaac

SEQ ID NO: 38449 - DNA, 21 bp, Artificial Sequence
  Description of Artificial Sequence: Synthetic oligonucleotide
agcgaaccaacaatgatcgtc

SEQ ID NO: 38450 - DNA, 21 bp, Artificial Sequence
  Description of Artificial Sequence: Synthetic oligonucleotide
agcgaaccatacggaagactc

SEQ ID NO: 38451 - DNA, 21 bp, Artificial Sequence
  Description of Artificial Sequence: Synthetic oligonucleotide
agcgaaccataccacgcagca

SEQ ID NO: 38452 - DNA, 21 bp, Artificial Sequence
  Description of Artificial Sequence: Synthetic oligonucleotide
agcgaacaaagcagactcctc

SEQ ID NO: 38453 - DNA, 21 bp, Artificial Sequence
  Description of Artificial Sequence: Synthetic oligonucleotide
agcgaaagattcttcaacgga

SEQ ID NO: 38454 - DNA, 21 bp, Artificial Sequence
  Description of Artificial Sequence: Synthetic oligonucleotide
agcgaaagacacgcatgcagc

SEQ ID NO: 38455 - DNA, 21 bp, Artificial Sequence
  Description of Artificial Sequence: Synthetic oligonucleotide
agcgaaagaccagcagcagca

SEQ ID NO: 38456 - DNA, 21 bp, Artificial Sequence
  Description of Artificial Sequence: Synthetic oligonucleotide
agcgaaagaccaatgccaaaa

SEQ ID NO: 38457 - DNA, 21 bp, Artificial Sequence
  Description of Artificial Sequence: Synthetic oligonucleotide
agcgaaagaacactcatcatg

SEQ ID NO: 38458 - DNA, 21 bp, Artificial Sequence
  Description of Artificial Sequence: Synthetic oligonucleotide
agcgaaagagtcgcagcacac

SEQ ID NO: 38459 - DNA, 21 bp, Artificial Sequence
  Description of Artificial Sequence: Synthetic oligonucleotide
agcgaaagagtcgaaaaacac

SEQ ID NO: 38460 - DNA, 21 bp, Artificial Sequence
  Description of Artificial Sequence: Synthetic oligonucleotide
agcgaaagcagcagccaaaac

SEQ ID NO: 38461 - DNA, 21 bp, Artificial Sequence
  Description of Artificial Sequence: Synthetic oligonucleotide
agcgaaacaacaagcagacac

SEQ ID NO: 38462 - DNA, 21 bp, Artificial Sequence
  Description of Artificial Sequence: Synthetic oligonucleotide
agcgaagtcggaagcgcaaca

SEQ ID NO: 38463 - DNA, 21 bp, Artificial Sequence
  Description of Artificial Sequence: Synthetic oligonucleotide
agcgaagtcaacctcccaagc

SEQ ID NO: 38464 - DNA, 21 bp, Artificial Sequence
  Description of Artificial Sequence: Synthetic oligonucleotide
agcgaagtcagagcaacagca

SEQ ID NO: 38465 - DNA, 21 bp, Artificial Sequence
  Description of Artificial Sequence: Synthetic oligonucleotide
agcgaagtcagcccaagagga

SEQ ID NO: 38466 - DNA, 21 bp, Artificial Sequence
  Description of Artificial Sequence: Synthetic oligonucleotide
agcgaatggaaagtcgaacac

SEQ ID NO: 38467 - DNA, 21 bp, Artificial Sequence
  Description of Artificial Sequence: Synthetic oligonucleotide
agcgaatactaccacagcgca

SEQ ID NO: 38468 - DNA, 21 bp, Artificial Sequence
  Description of Artificial Sequence: Synthetic oligonucleotide
agcttcgcaccagcacacgac

SEQ ID NO: 38469 - DNA, 21 bp, Artificial Sequence
  Description of Artificial Sequence: Synthetic oligonucleotide
agcttcgcaagcttcccagga

SEQ ID NO: 38470 - DNA, 21 bp, Artificial Sequence
  Description of Artificial Sequence: Synthetic oligonucleotide
agcttcgacgacggaggacca

SEQ ID NO: 38471 - DNA, 21 bp, Artificial Sequence
  Description of Artificial Sequence: Synthetic oligonucleotide
agcttcgacggagtcccattc

SEQ ID NO: 38472 - DNA, 21 bp, Artificial Sequence
  Description of Artificial Sequence: Synthetic oligonucleotide
agcttcgaccacacactcgga

SEQ ID NO: 38473 - DNA, 21 bp, Artificial Sequence
  Description of Artificial Sequence: Synthetic oligonucleotide
agcttcgacaaattcgcagaa

SEQ ID NO: 38474 - DNA, 21 bp, Artificial Sequence
  Description of Artificial Sequence: Synthetic oligonucleotide
agcttcgacatggcactcaaa

SEQ ID NO: 38475 - DNA, 21 bp, Artificial Sequence
  Description of Artificial Sequence: Synthetic oligonucleotide
agcttcgacagcaacagaaca

SEQ ID NO: 38476 - DNA, 21 bp, Artificial Sequence
  Description of Artificial Sequence: Synthetic oligonucleotide
agcttcgaaagcaaaatgcac

SEQ ID NO: 38477 - DNA, 21 bp, Artificial Sequence
  Description of Artificial Sequence: Synthetic oligonucleotide
agcttcgaaacaatcggaaga

SEQ ID NO: 38478 - DNA, 21 bp, Artificial Sequence
  Description of Artificial Sequence: Synthetic oligonucleotide
agcttcgaaacatgggcacca

SEQ ID NO: 38479 - DNA, 21 bp, Artificial Sequence
  Description of Artificial Sequence: Synthetic oligonucleotide
agcttcggaatgaaaccaagc

SEQ ID NO: 38480 - DNA, 21 bp, Artificial Sequence
  Description of Artificial Sequence: Synthetic oligonucleotide
agcttcggaaacggaacagtc

SEQ ID NO: 38481 - DNA, 21 bp, Artificial Sequence
  Description of Artificial Sequence: Synthetic oligonucleotide
agcttcggaagcggaccaagc

SEQ ID NO: 38482 - DNA, 21 bp, Artificial Sequence
  Description of Artificial Sequence: Synthetic oligonucleotide
agcttccacgaagcaacaaac

SEQ ID NO: 38483 - DNA, 21 bp, Artificial Sequence
  Description of Artificial Sequence: Synthetic oligonucleotide
agcttcatcacagacgcacca

SEQ ID NO: 38484 - DNA, 21 bp, Artificial Sequence
  Description of Artificial Sequence: Synthetic oligonucleotide
agcttcaaagaccactacgca

SEQ ID NO: 38485 - DNA, 21 bp, Artificial Sequence
  Description of Artificial Sequence: Synthetic oligonucleotide
agcttcaaaagcacaaacctc

SEQ ID NO: 38486 - DNA, 21 bp, Artificial Sequence
  Description of Artificial Sequence: Synthetic oligonucleotide
agcttcaaaacaggaagcgca

SEQ ID NO: 38487 - DNA, 21 bp, Artificial Sequence
  Description of Artificial Sequence: Synthetic oligonucleotide
agcttcatgccacaactcgaa

SEQ ID NO: 38488 - DNA, 21 bp, Artificial Sequence
  Description of Artificial Sequence: Synthetic oligonucleotide
agcttcaacgcaggagcaagc

SEQ ID NO: 38489 - DNA, 21 bp, Artificial Sequence
  Description of Artificial Sequence: Synthetic oligonucleotide
agcttcccagacagaccactc

SEQ ID NO: 38490 - DNA, 21 bp, Artificial Sequence
  Description of Artificial Sequence: Synthetic oligonucleotide
agcttcccaggagaaagagtc

SEQ ID NO: 38491 - DNA, 21 bp, Artificial Sequence
  Description of Artificial Sequence: Synthetic oligonucleotide
agcttccaaggagcaagaaca

SEQ ID NO: 38492 - DNA, 21 bp, Artificial Sequence
  Description of Artificial Sequence: Synthetic oligonucleotide
agcttccaaagccacggagac

SEQ ID NO: 38493 - DNA, 21 bp, Artificial Sequence
  Description of Artificial Sequence: Synthetic oligonucleotide
agcttcagaggaggaatcagc

SEQ ID NO: 38494 - DNA, 21 bp, Artificial Sequence
  Description of Artificial Sequence: Synthetic oligonucleotide
agcttcagacaagcaagctgc

SEQ ID NO: 38495 - DNA, 21 bp, Artificial Sequence
  Description of Artificial Sequence: Synthetic oligonucleotide
agcttcagacaaccacaaagc

SEQ ID NO: 38496 - DNA, 21 bp, Artificial Sequence
  Description of Artificial Sequence: Synthetic oligonucleotide
agcttcagcgacccacaaaac

SEQ ID NO: 38497 - DNA, 21 bp, Artificial Sequence
  Description of Artificial Sequence: Synthetic oligonucleotide
agcttcagcggaccaaaaagc

SEQ ID NO: 38498 - DNA, 21 bp, Artificial Sequence
  Description of Artificial Sequence: Synthetic oligonucleotide
agcttcagcaacccaagccaa

SEQ ID NO: 38499 - DNA, 21 bp, Artificial Sequence
  Description of Artificial Sequence: Synthetic oligonucleotide
agcttcagcagagcaacaagc

SEQ ID NO: 38500 - DNA, 21 bp, Artificial Sequence
  Description of Artificial Sequence: Synthetic oligonucleotide
agcttcagcagcacagcaagc

SEQ ID NO: 38501 - DNA, 21 bp, Artificial Sequence
  Description of Artificial Sequence: Synthetic oligonucleotide
agcttcacaggaagcgtcgca

SEQ ID NO: 38502 - DNA, 21 bp, Artificial Sequence
  Description of Artificial Sequence: Synthetic oligonucleotide
agcttcacaggaagcgtccca

SEQ ID NO: 38503 - DNA, 21 bp, Artificial Sequence
  Description of Artificial Sequence: Synthetic oligonucleotide
agcttcacacaagcactcgaa

SEQ ID NO: 38504 - DNA, 21 bp, Artificial Sequence
  Description of Artificial Sequence: Synthetic oligonucleotide
agcttcacaagacaagaagca

SEQ ID NO: 38505 - DNA, 21 bp, Artificial Sequence
  Description of Artificial Sequence: Synthetic oligonucleotide
agcttcacaacaggaggagtc

SEQ ID NO: 38506 - DNA, 21 bp, Artificial Sequence
  Description of Artificial Sequence: Synthetic oligonucleotide
agcttcacaacacaagcaaca

SEQ ID NO: 38507 - DNA, 21 bp, Artificial Sequence
  Description of Artificial Sequence: Synthetic oligonucleotide
agcttcgtcgacagagcagga

SEQ ID NO: 38508 - DNA, 21 bp, Artificial Sequence
  Description of Artificial Sequence: Synthetic oligonucleotide
agcttcgtccaaacaacacca

SEQ ID NO: 38509 - DNA, 21 bp, Artificial Sequence
  Description of Artificial Sequence: Synthetic oligonucleotide
agcttcgtcagaacaagcaca

SEQ ID NO: 38510 - DNA, 21 bp, Artificial Sequence
  Description of Artificial Sequence: Synthetic oligonucleotide
agcggagcagcaccaacatac

SEQ ID NO: 38511 - DNA, 21 bp, Artificial Sequence
  Description of Artificial Sequence: Synthetic oligonucleotide
agcggagcattccacctcagc

SEQ ID NO: 38512 - DNA, 21 bp, Artificial Sequence
  Description of Artificial Sequence: Synthetic oligonucleotide
agcggagcacaaccaatgttc

SEQ ID NO: 38513 - DNA, 21 bp, Artificial Sequence
  Description of Artificial Sequence: Synthetic oligonucleotide
agcggagcacaagtcccaagc

SEQ ID NO: 38514 - DNA, 21 bp, Artificial Sequence
  Description of Artificial Sequence: Synthetic oligonucleotide
agcggagcaagcgtcatcgca

SEQ ID NO: 38515 - DNA, 21 bp, Artificial Sequence
  Description of Artificial Sequence: Synthetic oligonucleotide
agcggagcaacacacccatac

SEQ ID NO: 38516 - DNA, 21 bp, Artificial Sequence
  Description of Artificial Sequence: Synthetic oligonucleotide
agcggagcagtcagcggactc

SEQ ID NO: 38517 - DNA, 21 bp, Artificial Sequence
  Description of Artificial Sequence: Synthetic oligonucleotide
agcggagcatacagcagcagc

SEQ ID NO: 38518 - DNA, 21 bp, Artificial Sequence
  Description of Artificial Sequence: Synthetic oligonucleotide
agcggatgcagcgaactccca

SEQ ID NO: 38519 - DNA, 21 bp, Artificial Sequence
  Description of Artificial Sequence: Synthetic oligonucleotide
agcggagacccaaaagacatc

SEQ ID NO: 38520 - DNA, 21 bp, Artificial Sequence
  Description of Artificial Sequence: Synthetic oligonucleotide
agcggagaccaaggaagcaga

SEQ ID NO: 38521 - DNA, 21 bp, Artificial Sequence
  Description of Artificial Sequence: Synthetic oligonucleotide
agcggagaagcaaaaagcgga

SEQ ID NO: 38522 - DNA, 21 bp, Artificial Sequence
  Description of Artificial Sequence: Synthetic oligonucleotide
agcggagaactcggaggactc

SEQ ID NO: 38523 - DNA, 21 bp, Artificial Sequence
  Description of Artificial Sequence: Synthetic oligonucleotide
agcggagaactcaacccacca

SEQ ID NO: 38524 - DNA, 21 bp, Artificial Sequence
  Description of Artificial Sequence: Synthetic oligonucleotide
agcggagaactcagatacatc

SEQ ID NO: 38525 - DNA, 21 bp, Artificial Sequence
  Description of Artificial Sequence: Synthetic oligonucleotide
agcggagaaagaacaagcgga

SEQ ID NO: 38526 - DNA, 21 bp, Artificial Sequence
  Description of Artificial Sequence: Synthetic oligonucleotide
agcggattcggagcaaaacaa

SEQ ID NO: 38527 - DNA, 21 bp, Artificial Sequence
  Description of Artificial Sequence: Synthetic oligonucleotide
agcggattcggaccactcaca

SEQ ID NO: 38528 - DNA, 21 bp, Artificial Sequence
  Description of Artificial Sequence: Synthetic oligonucleotide
agcggaggagcactcggatac

SEQ ID NO: 38529 - DNA, 21 bp, Artificial Sequence
  Description of Artificial Sequence: Synthetic oligonucleotide
agcggaggagcaagcacaaca

SEQ ID NO: 38530 - DNA, 21 bp, Artificial Sequence
  Description of Artificial Sequence: Synthetic oligonucleotide
agcggaggaggaacaagcctc

SEQ ID NO: 38531 - DNA, 21 bp, Artificial Sequence
  Description of Artificial Sequence: Synthetic oligonucleotide
agcggaggacacctcacaatc

SEQ ID NO: 38532 - DNA, 21 bp, Artificial Sequence
  Description of Artificial Sequence: Synthetic oligonucleotide
agcggaggactcagagcagca

SEQ ID NO: 38533 - DNA, 21 bp, Artificial Sequence
  Description of Artificial Sequence: Synthetic oligonucleotide
agcggaggacaagaatggaca

SEQ ID NO: 38534 - DNA, 21 bp, Artificial Sequence
  Description of Artificial Sequence: Synthetic oligonucleotide
agcggaggaagcttcacaaca

SEQ ID NO: 38535 - DNA, 21 bp, Artificial Sequence
  Description of Artificial Sequence: Synthetic oligonucleotide
agcggaatcggaagcagacaa

SEQ ID NO: 38536 - DNA, 21 bp, Artificial Sequence
  Description of Artificial Sequence: Synthetic oligonucleotide
agcggaatcctccaaagcagc

SEQ ID NO: 38537 - DNA, 21 bp, Artificial Sequence
  Description of Artificial Sequence: Synthetic oligonucleotide
agcggaatcagcctcagacca

SEQ ID NO: 38538 - DNA, 21 bp, Artificial Sequence
  Description of Artificial Sequence: Synthetic oligonucleotide
agcggaatcagcagaatcgac

SEQ ID NO: 38539 - DNA, 21 bp, Artificial Sequence
  Description of Artificial Sequence: Synthetic oligonucleotide
agcggaaaagcaagcccagga

SEQ ID NO: 38540 - DNA, 21 bp, Artificial Sequence
  Description of Artificial Sequence: Synthetic oligonucleotide
agcggaaaacacacaatgaac

SEQ ID NO: 38541 - DNA, 21 bp, Artificial Sequence
  Description of Artificial Sequence: Synthetic oligonucleotide
agcggaaaactcgtcgtcagc

SEQ ID NO: 38542 - DNA, 21 bp, Artificial Sequence
  Description of Artificial Sequence: Synthetic oligonucleotide
agcggaaaaatgggagtctac

SEQ ID NO: 38543 - DNA, 21 bp, Artificial Sequence
  Description of Artificial Sequence: Synthetic oligonucleotide
agcggaaaaaacccaggatac

SEQ ID NO: 38544 - DNA, 21 bp, Artificial Sequence
  Description of Artificial Sequence: Synthetic oligonucleotide
agcggaaaaccaatgggaaca

SEQ ID NO: 38545 - DNA, 21 bp, Artificial Sequence
  Description of Artificial Sequence: Synthetic oligonucleotide
agcggaaaaagcggattcgaa

SEQ ID NO: 38546 - DNA, 21 bp, Artificial Sequence
  Description of Artificial Sequence: Synthetic oligonucleotide
agcggactcgcagtccaccca

SEQ ID NO: 38547 - DNA, 21 bp, Artificial Sequence
  Description of Artificial Sequence: Synthetic oligonucleotide
agcggactcgaagacgtcgtc

SEQ ID NO: 38548 - DNA, 21 bp, Artificial Sequence
  Description of Artificial Sequence: Synthetic oligonucleotide
agcggactcggaatcagcaca

SEQ ID NO: 38549 - DNA, 21 bp, Artificial Sequence
  Description of Artificial Sequence: Synthetic oligonucleotide
agcggactccacgcactcaca

SEQ ID NO: 38550 - DNA, 21 bp, Artificial Sequence
  Description of Artificial Sequence: Synthetic oligonucleotide
agcggactcatcgcaacagga

SEQ ID NO: 38551 - DNA, 21 bp, Artificial Sequence
  Description of Artificial Sequence: Synthetic oligonucleotide
agcggactcaacccaaaaagc

SEQ ID NO: 38552 - DNA, 21 bp, Artificial Sequence
  Description of Artificial Sequence: Synthetic oligonucleotide
agcggactcaacagaacagtc

SEQ ID NO: 38553 - DNA, 21 bp, Artificial Sequence
  Description of Artificial Sequence: Synthetic oligonucleotide
agcggactcagcgcatacctc

SEQ ID NO: 38554 - DNA, 21 bp, Artificial Sequence
  Description of Artificial Sequence: Synthetic oligonucleotide
agcggaatgggacacgtcgca

SEQ ID NO: 38555 - DNA, 21 bp, Artificial Sequence
  Description of Artificial Sequence: Synthetic oligonucleotide
agcggaatgctcatgagagga

SEQ ID NO: 38556 - DNA, 21 bp, Artificial Sequence
  Description of Artificial Sequence: Synthetic oligonucleotide
agcggaatgacagacagccca

SEQ ID NO: 38557 - DNA, 21 bp, Artificial Sequence
  Description of Artificial Sequence: Synthetic oligonucleotide
agcggaaacggagtcctcctc

SEQ ID NO: 38558 - DNA, 21 bp, Artificial Sequence
  Description of Artificial Sequence: Synthetic oligonucleotide
agcggaaacctcggatacgca

SEQ ID NO: 38559 - DNA, 21 bp, Artificial Sequence
  Description of Artificial Sequence: Synthetic oligonucleotide
agcggaaacatgagcgcagga

SEQ ID NO: 38560 - DNA, 21 bp, Artificial Sequence
  Description of Artificial Sequence: Synthetic oligonucleotide
agcggaaacccaagccaagca

SEQ ID NO: 38561 - DNA, 21 bp, Artificial Sequence
  Description of Artificial Sequence: Synthetic oligonucleotide
agcggaaacacatacagcaga

SEQ ID NO: 38562 - DNA, 21 bp, Artificial Sequence
  Description of Artificial Sequence: Synthetic oligonucleotide
agcggaccagacatcttcctc

SEQ ID NO: 38563 - DNA, 21 bp, Artificial Sequence
  Description of Artificial Sequence: Synthetic oligonucleotide
agcggaccacacggaggacaa

SEQ ID NO: 38564 - DNA, 21 bp, Artificial Sequence
  Description of Artificial Sequence: Synthetic oligonucleotide
agcggaccactcaacagccca

SEQ ID NO: 38565 - DNA, 21 bp, Artificial Sequence
  Description of Artificial Sequence: Synthetic oligonucleotide
agcggaccaagactcggacca

SEQ ID NO: 38566 - DNA, 21 bp, Artificial Sequence
  Description of Artificial Sequence: Synthetic oligonucleotide
agcggaccaagcgtcctcaga

SEQ ID NO: 38567 - DNA, 21 bp, Artificial Sequence
  Description of Artificial Sequence: Synthetic oligonucleotide
agcggaccaacacacgcaatg

SEQ ID NO: 38568 - DNA, 21 bp, Artificial Sequence
  Description of Artificial Sequence: Synthetic oligonucleotide
agcggaccagtcggaagaaca

SEQ ID NO: 38569 - DNA, 21 bp, Artificial Sequence
  Description of Artificial Sequence: Synthetic oligonucleotide
agcggaccatacaaactcgaa

SEQ ID NO: 38570 - DNA, 21 bp, Artificial Sequence
  Description of Artificial Sequence: Synthetic oligonucleotide
agcggaccatacccaatcaaa

SEQ ID NO: 38571 - DNA, 21 bp, Artificial Sequence
  Description of Artificial Sequence: Synthetic oligonucleotide
agcggacaagcaagcctcaca

SEQ ID NO: 38572 - DNA, 21 bp, Artificial Sequence
  Description of Artificial Sequence: Synthetic oligonucleotide
agcggacaaagcatcagccca

SEQ ID NO: 38573 - DNA, 21 bp, Artificial Sequence
  Description of Artificial Sequence: Synthetic oligonucleotide
agcggacaagtcccaagcgca

SEQ ID NO: 38574 - DNA, 21 bp, Artificial Sequence
  Description of Artificial Sequence: Synthetic oligonucleotide
agcggacaatacccaagcatc

SEQ ID NO: 38575 - DNA, 21 bp, Artificial Sequence
  Description of Artificial Sequence: Synthetic oligonucleotide
agcggaagaggaccaccacca

SEQ ID NO: 38576 - DNA, 21 bp, Artificial Sequence
  Description of Artificial Sequence: Synthetic oligonucleotide
agcggaagacacagcgacgac

SEQ ID NO: 38577 - DNA, 21 bp, Artificial Sequence
  Description of Artificial Sequence: Synthetic oligonucleotide
agcggaagaccaagcccagca

SEQ ID NO: 38578 - DNA, 21 bp, Artificial Sequence
  Description of Artificial Sequence: Synthetic oligonucleotide
agcggaagacaaccaacagtc

SEQ ID NO: 38579 - DNA, 21 bp, Artificial Sequence
  Description of Artificial Sequence: Synthetic oligonucleotide
agcggaagaacaatcatcaca

SEQ ID NO: 38580 - DNA, 21 bp, Artificial Sequence
  Description of Artificial Sequence: Synthetic oligonucleotide
agcggaagagtcacaaacagc

SEQ ID NO: 38581 - DNA, 21 bp, Artificial Sequence
  Description of Artificial Sequence: Synthetic oligonucleotide
agcggaagcgacccaagaaca

SEQ ID NO: 38582 - DNA, 21 bp, Artificial Sequence
  Description of Artificial Sequence: Synthetic oligonucleotide
agcggaagcggagtcccacaa

SEQ ID NO: 38583 - DNA, 21 bp, Artificial Sequence
  Description of Artificial Sequence: Synthetic oligonucleotide
agcggaagcaaagacagccac

SEQ ID NO: 38584 - DNA, 21 bp, Artificial Sequence
  Description of Artificial Sequence: Synthetic oligonucleotide
agcggaagcaaaggagcattc

SEQ ID NO: 38585 - DNA, 21 bp, Artificial Sequence
  Description of Artificial Sequence: Synthetic oligonucleotide
agcggaagcatgagccaagtc

SEQ ID NO: 38586 - DNA, 21 bp, Artificial Sequence
  Description of Artificial Sequence: Synthetic oligonucleotide
agcggaagcaacatgctcaaa

SEQ ID NO: 38587 - DNA, 21 bp, Artificial Sequence
  Description of Artificial Sequence: Synthetic oligonucleotide
agcggaagcccaagaatcagc

SEQ ID NO: 38588 - DNA, 21 bp, Artificial Sequence
  Description of Artificial Sequence: Synthetic oligonucleotide
agcggaagccaaggaacaaga

SEQ ID NO: 38589 - DNA, 21 bp, Artificial Sequence
  Description of Artificial Sequence: Synthetic oligonucleotide
agcggaagcagaatcatggaa

SEQ ID NO: 38590 - DNA, 21 bp, Artificial Sequence
  Description of Artificial Sequence: Synthetic oligonucleotide
agcggaagcagaaacctcgga

SEQ ID NO: 38591 - DNA, 21 bp, Artificial Sequence
  Description of Artificial Sequence: Synthetic oligonucleotide
agcggaagcagaaacatggtc

SEQ ID NO: 38592 - DNA, 21 bp, Artificial Sequence
  Description of Artificial Sequence: Synthetic oligonucleotide
agcggaagcagaagcatgctc

SEQ ID NO: 38593 - DNA, 21 bp, Artificial Sequence
  Description of Artificial Sequence: Synthetic oligonucleotide
agcggaagcagagtcgcacca

SEQ ID NO: 38594 - DNA, 21 bp, Artificial Sequence
  Description of Artificial Sequence: Synthetic oligonucleotide
agcggaagcagcgcaagcaga

SEQ ID NO: 38595 - DNA, 21 bp, Artificial Sequence
  Description of Artificial Sequence: Synthetic oligonucleotide
agcggaagcagcggaagcgca

SEQ ID NO: 38596 - DNA, 21 bp, Artificial Sequence
  Description of Artificial Sequence: Synthetic oligonucleotide
agcggaagcagcaaaagcatg

SEQ ID NO: 38597 - DNA, 21 bp, Artificial Sequence
  Description of Artificial Sequence: Synthetic oligonucleotide
agcggaagcagcacatgcatc

SEQ ID NO: 38598 - DNA, 21 bp, Artificial Sequence
  Description of Artificial Sequence: Synthetic oligonucleotide
agcggaagcagcacaatcaac

SEQ ID NO: 38599 - DNA, 21 bp, Artificial Sequence
  Description of Artificial Sequence: Synthetic oligonucleotide
agcggaagcagcacaccacaa

SEQ ID NO: 38600 - DNA, 21 bp, Artificial Sequence
  Description of Artificial Sequence: Synthetic oligonucleotide
agcggaagcgtctggccagac

SEQ ID NO: 38601 - DNA, 21 bp, Artificial Sequence
  Description of Artificial Sequence: Synthetic oligonucleotide
agcggaagctacccaagagac

SEQ ID NO: 38602 - DNA, 21 bp, Artificial Sequence
  Description of Artificial Sequence: Synthetic oligonucleotide
agcggaacagcactcacactc

SEQ ID NO: 38603 - DNA, 21 bp, Artificial Sequence
  Description of Artificial Sequence: Synthetic oligonucleotide
agcggaacagaccacctcctc

SEQ ID NO: 38604 - DNA, 21 bp, Artificial Sequence
  Description of Artificial Sequence: Synthetic oligonucleotide
agcggaacaggacaagacgga

SEQ ID NO: 38605 - DNA, 21 bp, Artificial Sequence
  Description of Artificial Sequence: Synthetic oligonucleotide
agcggaacaggaagaggaaca

SEQ ID NO: 38606 - DNA, 21 bp, Artificial Sequence
  Description of Artificial Sequence: Synthetic oligonucleotide
agcggaacactcacacaaaaa

SEQ ID NO: 38607 - DNA, 21 bp, Artificial Sequence
  Description of Artificial Sequence: Synthetic oligonucleotide
agcggaacaccaatgagcaga

SEQ ID NO: 38608 - DNA, 21 bp, Artificial Sequence
  Description of Artificial Sequence: Synthetic oligonucleotide
agcggaacaagcgtcttcgca

SEQ ID NO: 38609 - DNA, 21 bp, Artificial Sequence
  Description of Artificial Sequence: Synthetic oligonucleotide
agcggaacaacagcatgggca

SEQ ID NO: 38610 - DNA, 21 bp, Artificial Sequence
  Description of Artificial Sequence: Synthetic oligonucleotide
agcggaacaacaggatacaga

SEQ ID NO: 38611 - DNA, 21 bp, Artificial Sequence
  Description of Artificial Sequence: Synthetic oligonucleotide
agcggaacagtctacagagtc

SEQ ID NO: 38612 - DNA, 21 bp, Artificial Sequence
  Description of Artificial Sequence: Synthetic oligonucleotide
agcggagtcggaatgatcagc

SEQ ID NO: 38613 - DNA, 21 bp, Artificial Sequence
  Description of Artificial Sequence: Synthetic oligonucleotide
agcggagtccacccattccca

SEQ ID NO: 38614 - DNA, 21 bp, Artificial Sequence
  Description of Artificial Sequence: Synthetic oligonucleotide
agcggagtcatcaaaacaagc

SEQ ID NO: 38615 - DNA, 21 bp, Artificial Sequence
  Description of Artificial Sequence: Synthetic oligonucleotide
agcggagtcaacctcagcagc

SEQ ID NO: 38616 - DNA, 21 bp, Artificial Sequence
  Description of Artificial Sequence: Synthetic oligonucleotide
agcggagtccaaagcggacca

SEQ ID NO: 38617 - DNA, 21 bp, Artificial Sequence
  Description of Artificial Sequence: Synthetic oligonucleotide
agcggagtcagacaagtcgca

SEQ ID NO: 38618 - DNA, 21 bp, Artificial Sequence
  Description of Artificial Sequence: Synthetic oligonucleotide
agcggagtcagcatgctccca

SEQ ID NO: 38619 - DNA, 21 bp, Artificial Sequence
  Description of Artificial Sequence: Synthetic oligonucleotide
agcggagtcagcagatacgca

SEQ ID NO: 38620 - DNA, 21 bp, Artificial Sequence
  Description of Artificial Sequence: Synthetic oligonucleotide
agcggagtcagctacgtcgaa

SEQ ID NO: 38621 - DNA, 21 bp, Artificial Sequence
  Description of Artificial Sequence: Synthetic oligonucleotide
agcggatacccaaacctcgac

SEQ ID NO: 38622 - DNA, 21 bp, Artificial Sequence
  Description of Artificial Sequence: Synthetic oligonucleotide
agccacgcagcacaactccca

SEQ ID NO: 38623 - DNA, 21 bp, Artificial Sequence
  Description of Artificial Sequence: Synthetic oligonucleotide
agccacgcaaacctccacgca

SEQ ID NO: 38624 - DNA, 21 bp, Artificial Sequence
  Description of Artificial Sequence: Synthetic oligonucleotide
agccacgcaaacacaagcagc

SEQ ID NO: 38625 - DNA, 21 bp, Artificial Sequence
  Description of Artificial Sequence: Synthetic oligonucleotide
agccacgcaagcaactaccca

SEQ ID NO: 38626 - DNA, 21 bp, Artificial Sequence
  Description of Artificial Sequence: Synthetic oligonucleotide
agccacgcaagcgtcagaagc

SEQ ID NO: 38627 - DNA, 21 bp, Artificial Sequence
  Description of Artificial Sequence: Synthetic oligonucleotide
agccacgcaacaacaccaagc

SEQ ID NO: 38628 - DNA, 21 bp, Artificial Sequence
  Description of Artificial Sequence: Synthetic oligonucleotide
agccacgcagtcagaatggga

SEQ ID NO: 38629 - DNA, 21 bp, Artificial Sequence
  Description of Artificial Sequence: Synthetic oligonucleotide
agccacgacaacagaggagtc

SEQ ID NO: 38630 - DNA, 21 bp, Artificial Sequence
  Description of Artificial Sequence: Synthetic oligonucleotide
agccacgaaaacggaagcaca

SEQ ID NO: 38631 - DNA, 21 bp, Artificial Sequence
  Description of Artificial Sequence: Synthetic oligonucleotide
agccacgaaccacacacaaga

SEQ ID NO: 38632 - DNA, 21 bp, Artificial Sequence
  Description of Artificial Sequence: Synthetic oligonucleotide
agccacgaaagcctcggaatg

SEQ ID NO: 38633 - DNA, 21 bp, Artificial Sequence
  Description of Artificial Sequence: Synthetic oligonucleotide
agccacttcccaatggcacca

SEQ ID NO: 38634 - DNA, 21 bp, Artificial Sequence
  Description of Artificial Sequence: Synthetic oligonucleotide
agccacttcagcgcagcagaa

SEQ ID NO: 38635 - DNA, 21 bp, Artificial Sequence
  Description of Artificial Sequence: Synthetic oligonucleotide
agccacggaccaccaagaagc

SEQ ID NO: 38636 - DNA, 21 bp, Artificial Sequence
  Description of Artificial Sequence: Synthetic oligonucleotide
agccacggaccatacccatac

SEQ ID NO: 38637 - DNA, 21 bp, Artificial Sequence
  Description of Artificial Sequence: Synthetic oligonucleotide
agccacggaagcgcagtcaac

SEQ ID NO: 38638 - DNA, 21 bp, Artificial Sequence
  Description of Artificial Sequence: Synthetic oligonucleotide
agccacggaagcttcccaagc

SEQ ID NO: 38639 - DNA, 21 bp, Artificial Sequence
  Description of Artificial Sequence: Synthetic oligonucleotide
agccacggaacaaaaagcaca

SEQ ID NO: 38640 - DNA, 21 bp, Artificial Sequence
  Description of Artificial Sequence: Synthetic oligonucleotide
agccaccacggaagcatcatc

SEQ ID NO: 38641 - DNA, 21 bp, Artificial Sequence
  Description of Artificial Sequence: Synthetic oligonucleotide
agccacatccaactcgcacca

SEQ ID NO: 38642 - DNA, 21 bp, Artificial Sequence
  Description of Artificial Sequence: Synthetic oligonucleotide
agccacaaaagaatggtcgac

SEQ ID NO: 38643 - DNA, 21 bp, Artificial Sequence
  Description of Artificial Sequence: Synthetic oligonucleotide
agccacaaaagcccaacacca

SEQ ID NO: 38644 - DNA, 21 bp, Artificial Sequence
  Description of Artificial Sequence: Synthetic oligonucleotide
agccacctcgaaatcgacatg

SEQ ID NO: 38645 - DNA, 21 bp, Artificial Sequence
  Description of Artificial Sequence: Synthetic oligonucleotide
agccacctcaacctcagacca

SEQ ID NO: 38646 - DNA, 21 bp, Artificial Sequence
  Description of Artificial Sequence: Synthetic oligonucleotide
agccacctcccagtcagcatg

SEQ ID NO: 38647 - DNA, 21 bp, Artificial Sequence
  Description of Artificial Sequence: Synthetic oligonucleotide
agccacctccaaaacagaatc

SEQ ID NO: 38648 - DNA, 21 bp, Artificial Sequence
  Description of Artificial Sequence: Synthetic oligonucleotide
agccacatgacaggaagcaca

SEQ ID NO: 38649 - DNA, 21 bp, Artificial Sequence
  Description of Artificial Sequence: Synthetic oligonucleotide
agccacaacgcattcccaaca

SEQ ID NO: 38650 - DNA, 21 bp, Artificial Sequence
  Description of Artificial Sequence: Synthetic oligonucleotide
agccacaacgcactcatggac

SEQ ID NO: 38651 - DNA, 21 bp, Artificial Sequence
  Description of Artificial Sequence: Synthetic oligonucleotide
agccacaacatcccagcagga

SEQ ID NO: 38652 - DNA, 21 bp, Artificial Sequence
  Description of Artificial Sequence: Synthetic oligonucleotide
agccacaacaaactcagcagc

SEQ ID NO: 38653 - DNA, 21 bp, Artificial Sequence
  Description of Artificial Sequence: Synthetic oligonucleotide
agccacccagcaatcagcgca

SEQ ID NO: 38654 - DNA, 21 bp, Artificial Sequence
  Description of Artificial Sequence: Synthetic oligonucleotide
agccacccagcactcccacca

SEQ ID NO: 38655 - DNA, 21 bp, Artificial Sequence
  Description of Artificial Sequence: Synthetic oligonucleotide
agccacccagacctcagccca

SEQ ID NO: 38656 - DNA, 21 bp, Artificial Sequence
  Description of Artificial Sequence: Synthetic oligonucleotide
agccacccaatgctcccaaca

SEQ ID NO: 38657 - DNA, 21 bp, Artificial Sequence
  Description of Artificial Sequence: Synthetic oligonucleotide
agccacccaatgatgccagca

SEQ ID NO: 38658 - DNA, 21 bp, Artificial Sequence
  Description of Artificial Sequence: Synthetic oligonucleotide
agccacccaccactcagactc

SEQ ID NO: 38659 - DNA, 21 bp, Artificial Sequence
  Description of Artificial Sequence: Synthetic oligonucleotide
agccacccaagcagcgaacca

SEQ ID NO: 38660 - DNA, 21 bp, Artificial Sequence
  Description of Artificial Sequence: Synthetic oligonucleotide
agccaccaagcaagagcacca

SEQ ID NO: 38661 - DNA, 21 bp, Artificial Sequence
  Description of Artificial Sequence: Synthetic oligonucleotide
agccacagaggagacgaacac

SEQ ID NO: 38662 - DNA, 21 bp, Artificial Sequence
  Description of Artificial Sequence: Synthetic oligonucleotide
agccacagaccaagcacactc

SEQ ID NO: 38663 - DNA, 21 bp, Artificial Sequence
  Description of Artificial Sequence: Synthetic oligonucleotide
agccacagaccaacaagcagc

SEQ ID NO: 38664 - DNA, 21 bp, Artificial Sequence
  Description of Artificial Sequence: Synthetic oligonucleotide
agccacagcgcactcatggga

SEQ ID NO: 38665 - DNA, 21 bp, Artificial Sequence
  Description of Artificial Sequence: Synthetic oligonucleotide
agccacagcgcaatgcaacac

SEQ ID NO: 38666 - DNA, 21 bp, Artificial Sequence
  Description of Artificial Sequence: Synthetic oligonucleotide
agccacagccacagcgacgca

SEQ ID NO: 38667 - DNA, 21 bp, Artificial Sequence
  Description of Artificial Sequence: Synthetic oligonucleotide
agccacagcctcggaggaaac

SEQ ID NO: 38668 - DNA, 21 bp, Artificial Sequence
  Description of Artificial Sequence: Synthetic oligonucleotide
agccacagcccagacatcaaa

SEQ ID NO: 38669 - DNA, 21 bp, Artificial Sequence
  Description of Artificial Sequence: Synthetic oligonucleotide
agccacagcccactcctccca

SEQ ID NO: 38670 - DNA, 21 bp, Artificial Sequence
  Description of Artificial Sequence: Synthetic oligonucleotide
agccacagcagcatcatggtc

SEQ ID NO: 38671 - DNA, 21 bp, Artificial Sequence
  Description of Artificial Sequence: Synthetic oligonucleotide
agccacagcagcagactcatg

SEQ ID NO: 38672 - DNA, 21 bp, Artificial Sequence
  Description of Artificial Sequence: Synthetic oligonucleotide
agccacacacacggaaaccca

SEQ ID NO: 38673 - DNA, 21 bp, Artificial Sequence
  Description of Artificial Sequence: Synthetic oligonucleotide
agccacacaaaagtcagccac

SEQ ID NO: 38674 - DNA, 21 bp, Artificial Sequence
  Description of Artificial Sequence: Synthetic oligonucleotide
agccacacaccaagagcaagc

SEQ ID NO: 38675 - DNA, 21 bp, Artificial Sequence
  Description of Artificial Sequence: Synthetic oligonucleotide
agccacacaagaccagacgca

SEQ ID NO: 38676 - DNA, 21 bp, Artificial Sequence
  Description of Artificial Sequence: Synthetic oligonucleotide
agccacacaagcctcccaaga

SEQ ID NO: 38677 - DNA, 21 bp, Artificial Sequence
  Description of Artificial Sequence: Synthetic oligonucleotide
agccacacaagcctcgtcatc

SEQ ID NO: 38678 - DNA, 21 bp, Artificial Sequence
  Description of Artificial Sequence: Synthetic oligonucleotide
agccacgtcgcaggacacgca

SEQ ID NO: 38679 - DNA, 21 bp, Artificial Sequence
  Description of Artificial Sequence: Synthetic oligonucleotide
agccacgtcgcaagcaaagga

SEQ ID NO: 38680 - DNA, 21 bp, Artificial Sequence
  Description of Artificial Sequence: Synthetic oligonucleotide
agccacgtcgtcaacagcctc

SEQ ID NO: 38681 - DNA, 21 bp, Artificial Sequence
  Description of Artificial Sequence: Synthetic oligonucleotide
agccacgtctacccaggacca

SEQ ID NO: 38682 - DNA, 21 bp, Artificial Sequence
  Description of Artificial Sequence: Synthetic oligonucleotide
agcatcgcagcacaccaagga

SEQ ID NO: 38683 - DNA, 21 bp, Artificial Sequence
  Description of Artificial Sequence: Synthetic oligonucleotide
agcatcgcacaagtcggagca

SEQ ID NO: 38684 - DNA, 21 bp, Artificial Sequence
  Description of Artificial Sequence: Synthetic oligonucleotide
agcatcgcaagagcagtcaca

SEQ ID NO: 38685 - DNA, 21 bp, Artificial Sequence
  Description of Artificial Sequence: Synthetic oligonucleotide
agcatcgacagcatcgcagtc

SEQ ID NO: 38686 - DNA, 21 bp, Artificial Sequence
  Description of Artificial Sequence: Synthetic oligonucleotide
agcatcgacagcagcagcctc

SEQ ID NO: 38687 - DNA, 21 bp, Artificial Sequence
  Description of Artificial Sequence: Synthetic oligonucleotide
agcatcgacagcacatacatg

SEQ ID NO: 38688 - DNA, 21 bp, Artificial Sequence
  Description of Artificial Sequence: Synthetic oligonucleotide
agcatcgaaagagaactcaga

SEQ ID NO: 38689 - DNA, 21 bp, Artificial Sequence
  Description of Artificial Sequence: Synthetic oligonucleotide
agcatcggaggagtcctctac

SEQ ID NO: 38690 - DNA, 21 bp, Artificial Sequence
  Description of Artificial Sequence: Synthetic oligonucleotide
agcatcggaaacttcccagac

SEQ ID NO: 38691 - DNA, 21 bp, Artificial Sequence
  Description of Artificial Sequence: Synthetic oligonucleotide
agcatcggaagcgcaccagca

SEQ ID NO: 38692 - DNA, 21 bp, Artificial Sequence
  Description of Artificial Sequence: Synthetic oligonucleotide
agcatcggaacagtcgtcgga

SEQ ID NO: 38693 - DNA, 21 bp, Artificial Sequence
  Description of Artificial Sequence: Synthetic oligonucleotide
agcatcggagtccacccagga

SEQ ID NO: 38694 - DNA, 21 bp, Artificial Sequence
  Description of Artificial Sequence: Synthetic oligonucleotide
agcatccacctcgtcacaagc

SEQ ID NO: 38695 - DNA, 21 bp, Artificial Sequence
  Description of Artificial Sequence: Synthetic oligonucleotide
agcatccacaacggaccacaa

SEQ ID NO: 38696 - DNA, 21 bp, Artificial Sequence
  Description of Artificial Sequence: Synthetic oligonucleotide
agcatcatcgaaagcgtcgca

SEQ ID NO: 38697 - DNA, 21 bp, Artificial Sequence
  Description of Artificial Sequence: Synthetic oligonucleotide
agcatcatccaagcaaaacca

SEQ ID NO: 38698 - DNA, 21 bp, Artificial Sequence
  Description of Artificial Sequence: Synthetic oligonucleotide
agcatcatcagcgaaagaaga

SEQ ID NO: 38699 - DNA, 21 bp, Artificial Sequence
  Description of Artificial Sequence: Synthetic oligonucleotide
agcatcaaagtcaacccacca

SEQ ID NO: 38700 - DNA, 21 bp, Artificial Sequence
  Description of Artificial Sequence: Synthetic oligonucleotide
agcatcctcggagcaatccca

SEQ ID NO: 38701 - DNA, 21 bp, Artificial Sequence
  Description of Artificial Sequence: Synthetic oligonucleotide
agcatcctctacggaatgcca

SEQ ID NO: 38702 - DNA, 21 bp, Artificial Sequence
  Description of Artificial Sequence: Synthetic oligonucleotide
agcatcatgaacacaggacca

SEQ ID NO: 38703 - DNA, 21 bp, Artificial Sequence
  Description of Artificial Sequence: Synthetic oligonucleotide
agcatcatgagaacagactgc

SEQ ID NO: 38704 - DNA, 21 bp, Artificial Sequence
  Description of Artificial Sequence: Synthetic oligonucleotide
agcatcaacgaagaaccacca

SEQ ID NO: 38705 - DNA, 21 bp, Artificial Sequence
  Description of Artificial Sequence: Synthetic oligonucleotide
agcatcaacgtcacacacgga

SEQ ID NO: 38706 - DNA, 21 bp, Artificial Sequence
  Description of Artificial Sequence: Synthetic oligonucleotide
agcatcccaatgagcggaaga

SEQ ID NO: 38707 - DNA, 21 bp, Artificial Sequence
  Description of Artificial Sequence: Synthetic oligonucleotide
agcatcccaaacctccaagca

SEQ ID NO: 38708 - DNA, 21 bp, Artificial Sequence
  Description of Artificial Sequence: Synthetic oligonucleotide
agcatcccaaacctctacgac

SEQ ID NO: 38709 - DNA, 21 bp, Artificial Sequence
  Description of Artificial Sequence: Synthetic oligonucleotide
agcatcccaaacagcagacaa

SEQ ID NO: 38710 - DNA, 21 bp, Artificial Sequence
  Description of Artificial Sequence: Synthetic oligonucleotide
agcatccaaaaacacctccca

SEQ ID NO: 38711 - DNA, 21 bp, Artificial Sequence
  Description of Artificial Sequence: Synthetic oligonucleotide
agcatccaatggaaagacagc

SEQ ID NO: 38712 - DNA, 21 bp, Artificial Sequence
  Description of Artificial Sequence: Synthetic oligonucleotide
agcatcagcctcccataccca

SEQ ID NO: 38713 - DNA, 21 bp, Artificial Sequence
  Description of Artificial Sequence: Synthetic oligonucleotide
agcatcagcccaagcccagga

SEQ ID NO: 38714 - DNA, 21 bp, Artificial Sequence
  Description of Artificial Sequence: Synthetic oligonucleotide
agcatcagcagccaagacctc

SEQ ID NO: 38715 - DNA, 21 bp, Artificial Sequence
  Description of Artificial Sequence: Synthetic oligonucleotide
agcatcagcagcagcagcgga

SEQ ID NO: 38716 - DNA, 21 bp, Artificial Sequence
  Description of Artificial Sequence: Synthetic oligonucleotide
agcatcagcgtcatgaaacaa

SEQ ID NO: 38717 - DNA, 21 bp, Artificial Sequence
  Description of Artificial Sequence: Synthetic oligonucleotide
agcatcacaccattcaacgaa

SEQ ID NO: 38718 - DNA, 21 bp, Artificial Sequence
  Description of Artificial Sequence: Synthetic oligonucleotide
agcatcacaagcgaaaaaatc

SEQ ID NO: 38719 - DNA, 21 bp, Artificial Sequence
  Description of Artificial Sequence: Synthetic oligonucleotide
agcatcacaacaggaagagga

SEQ ID NO: 38720 - DNA, 21 bp, Artificial Sequence
  Description of Artificial Sequence: Synthetic oligonucleotide
agcatcacaacaagaacagac

SEQ ID NO: 38721 - DNA, 21 bp, Artificial Sequence
  Description of Artificial Sequence: Synthetic oligonucleotide
agcatcgtccacccagacagc

SEQ ID NO: 38722 - DNA, 21 bp, Artificial Sequence
  Description of Artificial Sequence: Synthetic oligonucleotide
agcatcgtcctcaaaggaagc

SEQ ID NO: 38723 - DNA, 21 bp, Artificial Sequence
  Description of Artificial Sequence: Synthetic oligonucleotide
agcatcgtcagcagagtcgaa

SEQ ID NO: 38724 - DNA, 21 bp, Artificial Sequence
  Description of Artificial Sequence: Synthetic oligonucleotide
agcatcgtcacagtcagcgga

SEQ ID NO: 38725 - DNA, 21 bp, Artificial Sequence
  Description of Artificial Sequence: Synthetic oligonucleotide
agcaaagcacacgaaaaccca

SEQ ID NO: 38726 - DNA, 21 bp, Artificial Sequence
  Description of Artificial Sequence: Synthetic oligonucleotide
agcaaagcaccatacagcgca

SEQ ID NO: 38727 - DNA, 21 bp, Artificial Sequence
  Description of Artificial Sequence: Synthetic oligonucleotide
agcaaagcaagcctcaaccca

SEQ ID NO: 38728 - DNA, 21 bp, Artificial Sequence
  Description of Artificial Sequence: Synthetic oligonucleotide
agcaaagcatacacaccactc

SEQ ID NO: 38729 - DNA, 21 bp, Artificial Sequence
  Description of Artificial Sequence: Synthetic oligonucleotide
agcaaagacggaagcctcaac

SEQ ID NO: 38730 - DNA, 21 bp, Artificial Sequence
  Description of Artificial Sequence: Synthetic oligonucleotide
agcaaagaccacttcccagca

SEQ ID NO: 38731 - DNA, 21 bp, Artificial Sequence
  Description of Artificial Sequence: Synthetic oligonucleotide
agcaaagacatcctcagaagc

SEQ ID NO: 38732 - DNA, 21 bp, Artificial Sequence
  Description of Artificial Sequence: Synthetic oligonucleotide
agcaaagacatgctcgaaaca

SEQ ID NO: 38733 - DNA, 21 bp, Artificial Sequence
  Description of Artificial Sequence: Synthetic oligonucleotide
agcaaagacacactcagaaac

SEQ ID NO: 38734 - DNA, 21 bp, Artificial Sequence
  Description of Artificial Sequence: Synthetic oligonucleotide
agcaaagacacaccactcgca

SEQ ID NO: 38735 - DNA, 21 bp, Artificial Sequence
  Description of Artificial Sequence: Synthetic oligonucleotide
agcaaagaaatctacacacaa

SEQ ID NO: 38736 - DNA, 21 bp, Artificial Sequence
  Description of Artificial Sequence: Synthetic oligonucleotide
agcaaagaaaactacccacac

SEQ ID NO: 38737 - DNA, 21 bp, Artificial Sequence
  Description of Artificial Sequence: Synthetic oligonucleotide
agcaaagaaagattcccatac

SEQ ID NO: 38738 - DNA, 21 bp, Artificial Sequence
  Description of Artificial Sequence: Synthetic oligonucleotide
agcaaagaatacccagaatac

SEQ ID NO: 38739 - DNA, 21 bp, Artificial Sequence
  Description of Artificial Sequence: Synthetic oligonucleotide
agcaaattcaacggacacctc

SEQ ID NO: 38740 - DNA, 21 bp, Artificial Sequence
  Description of Artificial Sequence: Synthetic oligonucleotide
agcaaacacgaagtctacctc

SEQ ID NO: 38741 - DNA, 21 bp, Artificial Sequence
  Description of Artificial Sequence: Synthetic oligonucleotide
agcaaacacacagcattcgtc

SEQ ID NO: 38742 - DNA, 21 bp, Artificial Sequence
  Description of Artificial Sequence: Synthetic oligonucleotide
agcaaaatcgacctctacaca

SEQ ID NO: 38743 - DNA, 21 bp, Artificial Sequence
  Description of Artificial Sequence: Synthetic oligonucleotide
agcaaaatcgacagagacgac

SEQ ID NO: 38744 - DNA, 21 bp, Artificial Sequence
  Description of Artificial Sequence: Synthetic oligonucleotide
agcaaaatcccacacgaagtc

SEQ ID NO: 38745 - DNA, 21 bp, Artificial Sequence
  Description of Artificial Sequence: Synthetic oligonucleotide
agcaaactcgacgacggaaga

SEQ ID NO: 38746 - DNA, 21 bp, Artificial Sequence
  Description of Artificial Sequence: Synthetic oligonucleotide
agcaaactcggaagccacctc

SEQ ID NO: 38747 - DNA, 21 bp, Artificial Sequence
  Description of Artificial Sequence: Synthetic oligonucleotide
agcaaactcccaccactccac

SEQ ID NO: 38748 - DNA, 21 bp, Artificial Sequence
  Description of Artificial Sequence: Synthetic oligonucleotide
agcaaactcccagtcgcactc

SEQ ID NO: 38749 - DNA, 21 bp, Artificial Sequence
  Description of Artificial Sequence: Synthetic oligonucleotide
agcaaactcacaacagaacca

SEQ ID NO: 38750 - DNA, 21 bp, Artificial Sequence
  Description of Artificial Sequence: Synthetic oligonucleotide
agcaaaatgctcgaattcgtc

SEQ ID NO: 38751 - DNA, 21 bp, Artificial Sequence
  Description of Artificial Sequence: Synthetic oligonucleotide
agcaaaatgagcagactcgaa

SEQ ID NO: 38752 - DNA, 21 bp, Artificial Sequence
  Description of Artificial Sequence: Synthetic oligonucleotide
agcaaaaacaacccaagcctc

SEQ ID NO: 38753 - DNA, 21 bp, Artificial Sequence
  Description of Artificial Sequence: Synthetic oligonucleotide
agcaaaaacagccaagactac

SEQ ID NO: 38754 - DNA, 21 bp, Artificial Sequence
  Description of Artificial Sequence: Synthetic oligonucleotide
agcaaaaacagcgtcctcaac

SEQ ID NO: 38755 - DNA, 21 bp, Artificial Sequence
  Description of Artificial Sequence: Synthetic oligonucleotide
agcaaaaacgtctgcgaacca

SEQ ID NO: 38756 - DNA, 21 bp, Artificial Sequence
  Description of Artificial Sequence: Synthetic oligonucleotide
agcaaaccacacagagaagtc

SEQ ID NO: 38757 - DNA, 21 bp, Artificial Sequence
  Description of Artificial Sequence: Synthetic oligonucleotide
agcaaaccactcagcggattc

SEQ ID NO: 38758 - DNA, 21 bp, Artificial Sequence
  Description of Artificial Sequence: Synthetic oligonucleotide
agcaaaccaagcggaccaagc

SEQ ID NO: 38759 - DNA, 21 bp, Artificial Sequence
  Description of Artificial Sequence: Synthetic oligonucleotide
agcaaaccaacaccaacacac

SEQ ID NO: 38760 - DNA, 21 bp, Artificial Sequence
  Description of Artificial Sequence: Synthetic oligonucleotide
agcaaacaagcagcaagcgtc

SEQ ID NO: 38761 - DNA, 21 bp, Artificial Sequence
  Description of Artificial Sequence: Synthetic oligonucleotide
agcaaacaaatgccaatgcac

SEQ ID NO: 38762 - DNA, 21 bp, Artificial Sequence
  Description of Artificial Sequence: Synthetic oligonucleotide
agcaaaagaacaacatgggac

SEQ ID NO: 38763 - DNA, 21 bp, Artificial Sequence
  Description of Artificial Sequence: Synthetic oligonucleotide
agcaaaagcggaacaagcgaa

SEQ ID NO: 38764 - DNA, 21 bp, Artificial Sequence
  Description of Artificial Sequence: Synthetic oligonucleotide
agcaaaagcctcaaactcagc

SEQ ID NO: 38765 - DNA, 21 bp, Artificial Sequence
  Description of Artificial Sequence: Synthetic oligonucleotide
agcaaaagcccaaacccatac

SEQ ID NO: 38766 - DNA, 21 bp, Artificial Sequence
  Description of Artificial Sequence: Synthetic oligonucleotide
agcaaaagccaattcctcgca

SEQ ID NO: 38767 - DNA, 21 bp, Artificial Sequence
  Description of Artificial Sequence: Synthetic oligonucleotide
agcaaaagcagcatgctcatc

SEQ ID NO: 38768 - DNA, 21 bp, Artificial Sequence
  Description of Artificial Sequence: Synthetic oligonucleotide
agcaaaacagacagaatgaac

SEQ ID NO: 38769 - DNA, 21 bp, Artificial Sequence
  Description of Artificial Sequence: Synthetic oligonucleotide
agcaaaacaagcgacagaaca

SEQ ID NO: 38770 - DNA, 21 bp, Artificial Sequence
  Description of Artificial Sequence: Synthetic oligonucleotide
agcaaaacagtcgaacaaaac

SEQ ID NO: 38771 - DNA, 21 bp, Artificial Sequence
  Description of Artificial Sequence: Synthetic oligonucleotide
agcaaagtcccaagcctcgca

SEQ ID NO: 38772 - DNA, 21 bp, Artificial Sequence
  Description of Artificial Sequence: Synthetic oligonucleotide
agcaaagtcagagaaccaatc

SEQ ID NO: 38773 - DNA, 21 bp, Artificial Sequence
  Description of Artificial Sequence: Synthetic oligonucleotide
agcaaatacgcaacagtcgtc

SEQ ID NO: 38774 - DNA, 21 bp, Artificial Sequence
  Description of Artificial Sequence: Synthetic oligonucleotide
agcaaatacctcagaatggac

SEQ ID NO: 38775 - DNA, 21 bp, Artificial Sequence
  Description of Artificial Sequence: Synthetic oligonucleotide
agcaaatacacactcgcatac

SEQ ID NO: 38776 - DNA, 21 bp, Artificial Sequence
  Description of Artificial Sequence: Synthetic oligonucleotide
agcctcgcagacgcaaacgca

SEQ ID NO: 38777 - DNA, 21 bp, Artificial Sequence
  Description of Artificial Sequence: Synthetic oligonucleotide
agcctcgcaggaaacagcagc

SEQ ID NO: 38778 - DNA, 21 bp, Artificial Sequence
  Description of Artificial Sequence: Synthetic oligonucleotide
agcctcgcaaaaatgccagga

SEQ ID NO: 38779 - DNA, 21 bp, Artificial Sequence
  Description of Artificial Sequence: Synthetic oligonucleotide
agcctcgcactcgtcggaaga

SEQ ID NO: 38780 - DNA, 21 bp, Artificial Sequence
  Description of Artificial Sequence: Synthetic oligonucleotide
agcctcgcaccaacagtcatg

SEQ ID NO: 38781 - DNA, 21 bp, Artificial Sequence
  Description of Artificial Sequence: Synthetic oligonucleotide
agcctcgcacaaaaacaacca

SEQ ID NO: 38782 - DNA, 21 bp, Artificial Sequence
  Description of Artificial Sequence: Synthetic oligonucleotide
agcctcgcacaactccacagc

SEQ ID NO: 38783 - DNA, 21 bp, Artificial Sequence
  Description of Artificial Sequence: Synthetic oligonucleotide
agcctcgcaagcagcgcaatg

SEQ ID NO: 38784 - DNA, 21 bp, Artificial Sequence
  Description of Artificial Sequence: Synthetic oligonucleotide
agcctcgcaagcacaggattc

SEQ ID NO: 38785 - DNA, 21 bp, Artificial Sequence
  Description of Artificial Sequence: Synthetic oligonucleotide
agcctcgcaacaagaatcagc

SEQ ID NO: 38786 - DNA, 21 bp, Artificial Sequence
  Description of Artificial Sequence: Synthetic oligonucleotide
agcctcgcaacaagcccatac

SEQ ID NO: 38787 - DNA, 21 bp, Artificial Sequence
  Description of Artificial Sequence: Synthetic oligonucleotide
agcctcgacgcaacaaaagac

SEQ ID NO: 38788 - DNA, 21 bp, Artificial Sequence
  Description of Artificial Sequence: Synthetic oligonucleotide
agcctcgacttcccaagacca

SEQ ID NO: 38789 - DNA, 21 bp, Artificial Sequence
  Description of Artificial Sequence: Synthetic oligonucleotide
agcctcgaccaccacaacaga

SEQ ID NO: 38790 - DNA, 21 bp, Artificial Sequence
  Description of Artificial Sequence: Synthetic oligonucleotide
agcctcgacaaagcactcaga

SEQ ID NO: 38791 - DNA, 21 bp, Artificial Sequence
  Description of Artificial Sequence: Synthetic oligonucleotide
agcctcgacatgcaaaaacaa

SEQ ID NO: 38792 - DNA, 21 bp, Artificial Sequence
  Description of Artificial Sequence: Synthetic oligonucleotide
agcctcgacccaaaaaacagc

SEQ ID NO: 38793 - DNA, 21 bp, Artificial Sequence
  Description of Artificial Sequence: Synthetic oligonucleotide
agcctcgaaatcccaaaaatc

SEQ ID NO: 38794 - DNA, 21 bp, Artificial Sequence
  Description of Artificial Sequence: Synthetic oligonucleotide
agcctcgaaaaaagaggagaa

SEQ ID NO: 38795 - DNA, 21 bp, Artificial Sequence
  Description of Artificial Sequence: Synthetic oligonucleotide
agcctcgaaagacacgtctac

SEQ ID NO: 38796 - DNA, 21 bp, Artificial Sequence
  Description of Artificial Sequence: Synthetic oligonucleotide
agcctcgaaagcgaacacaga

SEQ ID NO: 38797 - DNA, 21 bp, Artificial Sequence
  Description of Artificial Sequence: Synthetic oligonucleotide
agcctcgaaagcatgatccac

SEQ ID NO: 38798 - DNA, 21 bp, Artificial Sequence
  Description of Artificial Sequence: Synthetic oligonucleotide
agcctcgaaagcagacactac

SEQ ID NO: 38799 - DNA, 21 bp, Artificial Sequence
  Description of Artificial Sequence: Synthetic oligonucleotide
agcctcgaagtcgtcagaaaa

SEQ ID NO: 38800 - DNA, 21 bp, Artificial Sequence
  Description of Artificial Sequence: Synthetic oligonucleotide
agcctcttcaaagacgtcagc

SEQ ID NO: 38801 - DNA, 21 bp, Artificial Sequence
  Description of Artificial Sequence: Synthetic oligonucleotide
agcctcttcccagcaggagga

SEQ ID NO: 38802 - DNA, 21 bp, Artificial Sequence
  Description of Artificial Sequence: Synthetic oligonucleotide
agcctcttcagcgcaagacca

SEQ ID NO: 38803 - DNA, 21 bp, Artificial Sequence
  Description of Artificial Sequence: Synthetic oligonucleotide
agcctcggattcagagcagga

SEQ ID NO: 38804 - DNA, 21 bp, Artificial Sequence
  Description of Artificial Sequence: Synthetic oligonucleotide
agcctcggaatcagcaacttc

SEQ ID NO: 38805 - DNA, 21 bp, Artificial Sequence
  Description of Artificial Sequence: Synthetic oligonucleotide
agcctcggaaaaacaagccca

SEQ ID NO: 38806 - DNA, 21 bp, Artificial Sequence
  Description of Artificial Sequence: Synthetic oligonucleotide
agcctcggaatgaaaagcgca

SEQ ID NO: 38807 - DNA, 21 bp, Artificial Sequence
  Description of Artificial Sequence: Synthetic oligonucleotide
agcctcggacaaagccaatac

SEQ ID NO: 38808 - DNA, 21 bp, Artificial Sequence
  Description of Artificial Sequence: Synthetic oligonucleotide
agcctcggaagaggaagcatc

SEQ ID NO: 38809 - DNA, 21 bp, Artificial Sequence
  Description of Artificial Sequence: Synthetic oligonucleotide
agcctcggaacaggagtcgga

SEQ ID NO: 38810 - DNA, 21 bp, Artificial Sequence
  Description of Artificial Sequence: Synthetic oligonucleotide
agcctccacgcaatcaaaaac

SEQ ID NO: 38811 - DNA, 21 bp, Artificial Sequence
  Description of Artificial Sequence: Synthetic oligonucleotide
agcctccacgcagtcgtcagc

SEQ ID NO: 38812 - DNA, 21 bp, Artificial Sequence
  Description of Artificial Sequence: Synthetic oligonucleotide
agcctccacgacatgagcgga

SEQ ID NO: 38813 - DNA, 21 bp, Artificial Sequence
  Description of Artificial Sequence: Synthetic oligonucleotide
agcctccacagcagcgacagc

SEQ ID NO: 38814 - DNA, 21 bp, Artificial Sequence
  Description of Artificial Sequence: Synthetic oligonucleotide
agcctcatcgacccatacgaa

SEQ ID NO: 38815 - DNA, 21 bp, Artificial Sequence
  Description of Artificial Sequence: Synthetic oligonucleotide
agcctcatcgacagacaccca

SEQ ID NO: 38816 - DNA, 21 bp, Artificial Sequence
  Description of Artificial Sequence: Synthetic oligonucleotide
agcctcatcggaggacaacaa

SEQ ID NO: 38817 - DNA, 21 bp, Artificial Sequence
  Description of Artificial Sequence: Synthetic oligonucleotide
agcctcatcagaagcagcaca

SEQ ID NO: 38818 - DNA, 21 bp, Artificial Sequence
  Description of Artificial Sequence: Synthetic oligonucleotide
agcctcatcagcgaaaaagga

SEQ ID NO: 38819 - DNA, 21 bp, Artificial Sequence
  Description of Artificial Sequence: Synthetic oligonucleotide
agcctcaaagcaagcccacca

SEQ ID NO: 38820 - DNA, 21 bp, Artificial Sequence
  Description of Artificial Sequence: Synthetic oligonucleotide
agcctcaaagaagcatggctc

SEQ ID NO: 38821 - DNA, 21 bp, Artificial Sequence
  Description of Artificial Sequence: Synthetic oligonucleotide
agcctcaaaatcccaacagca

SEQ ID NO: 38822 - DNA, 21 bp, Artificial Sequence
  Description of Artificial Sequence: Synthetic oligonucleotide
agcctcaaaaacgaactcgca

SEQ ID NO: 38823 - DNA, 21 bp, Artificial Sequence
  Description of Artificial Sequence: Synthetic oligonucleotide
agcctcaaaccaggaggagga

SEQ ID NO: 38824 - DNA, 21 bp, Artificial Sequence
  Description of Artificial Sequence: Synthetic oligonucleotide
agcctcaaaccataccaaagc

SEQ ID NO: 38825 - DNA, 21 bp, Artificial Sequence
  Description of Artificial Sequence: Synthetic oligonucleotide
agcctcaaacaaagccaccca

SEQ ID NO: 38826 - DNA, 21 bp, Artificial Sequence
  Description of Artificial Sequence: Synthetic oligonucleotide
agcctcaaaagcccacaactc

SEQ ID NO: 38827 - DNA, 21 bp, Artificial Sequence
  Description of Artificial Sequence: Synthetic oligonucleotide
agcctcaaaacatacccagaa

SEQ ID NO: 38828 - DNA, 21 bp, Artificial Sequence
  Description of Artificial Sequence: Synthetic oligonucleotide
agcctcctcgcaaaagtccca

SEQ ID NO: 38829 - DNA, 21 bp, Artificial Sequence
  Description of Artificial Sequence: Synthetic oligonucleotide
agcctcctcgacagaccaatc

SEQ ID NO: 38830 - DNA, 21 bp, Artificial Sequence
  Description of Artificial Sequence: Synthetic oligonucleotide
agcctcctcggaccaacacaa

SEQ ID NO: 38831 - DNA, 21 bp, Artificial Sequence
  Description of Artificial Sequence: Synthetic oligonucleotide
agcctcctcaaaccagtccaa

SEQ ID NO: 38832 - DNA, 21 bp, Artificial Sequence
  Description of Artificial Sequence: Synthetic oligonucleotide
agcctcctcctcctctgcgca

SEQ ID NO: 38833 - DNA, 21 bp, Artificial Sequence
  Description of Artificial Sequence: Synthetic oligonucleotide
agcctcctcctcaacagagga

SEQ ID NO: 38834 - DNA, 21 bp, Artificial Sequence
  Description of Artificial Sequence: Synthetic oligonucleotide
agcctcctcctccaaaaccca

SEQ ID NO: 38835 - DNA, 21 bp, Artificial Sequence
  Description of Artificial Sequence: Synthetic oligonucleotide
agcctcctcaacagcgacaca

SEQ ID NO: 38836 - DNA, 21 bp, Artificial Sequence
  Description of Artificial Sequence: Synthetic oligonucleotide
agcctcctcagacaagtccca

SEQ ID NO: 38837 - DNA, 21 bp, Artificial Sequence
  Description of Artificial Sequence: Synthetic oligonucleotide
agcctcctcagcgtcagccac

SEQ ID NO: 38838 - DNA, 21 bp, Artificial Sequence
  Description of Artificial Sequence: Synthetic oligonucleotide
agcctcctcacagcaagcgtc

SEQ ID NO: 38839 - DNA, 21 bp, Artificial Sequence
  Description of Artificial Sequence: Synthetic oligonucleotide
agcctcctcacaagcgcacca

SEQ ID NO: 38840 - DNA, 21 bp, Artificial Sequence
  Description of Artificial Sequence: Synthetic oligonucleotide
agcctcctcgtcaacctcagc

SEQ ID NO: 38841 - DNA, 21 bp, Artificial Sequence
  Description of Artificial Sequence: Synthetic oligonucleotide
agcctcctctacccaacacca

SEQ ID NO: 38842 - DNA, 21 bp, Artificial Sequence
  Description of Artificial Sequence: Synthetic oligonucleotide
agcctcatggcagcaggactc

SEQ ID NO: 38843 - DNA, 21 bp, Artificial Sequence
  Description of Artificial Sequence: Synthetic oligonucleotide
agcctcatggcaagcatcgga

SEQ ID NO: 38844 - DNA, 21 bp, Artificial Sequence
  Description of Artificial Sequence: Synthetic oligonucleotide
agcctcatgcacgacgtcagc

SEQ ID NO: 38845 - DNA, 21 bp, Artificial Sequence
  Description of Artificial Sequence: Synthetic oligonucleotide
agcctcatgagcctcgacaca

SEQ ID NO: 38846 - DNA, 21 bp, Artificial Sequence
  Description of Artificial Sequence: Synthetic oligonucleotide
agcctcatgagcccaagcatg

SEQ ID NO: 38847 - DNA, 21 bp, Artificial Sequence
  Description of Artificial Sequence: Synthetic oligonucleotide
agcctcaacctcagaggaaac

SEQ ID NO: 38848 - DNA, 21 bp, Artificial Sequence
  Description of Artificial Sequence: Synthetic oligonucleotide
agcctcaacaacgcaagaaac

SEQ ID NO: 38849 - DNA, 21 bp, Artificial Sequence
  Description of Artificial Sequence: Synthetic oligonucleotide
agcctcaacaacggactcaca

SEQ ID NO: 38850 - DNA, 21 bp, Artificial Sequence
  Description of Artificial Sequence: Synthetic oligonucleotide
agcctcaacaacagaccaagc

SEQ ID NO: 38851 - DNA, 21 bp, Artificial Sequence
  Description of Artificial Sequence: Synthetic oligonucleotide
agcctcaacccaaaaagccca

SEQ ID NO: 38852 - DNA, 21 bp, Artificial Sequence
  Description of Artificial Sequence: Synthetic oligonucleotide
agcctcaacccaagcggaatg

SEQ ID NO: 38853 - DNA, 21 bp, Artificial Sequence
  Description of Artificial Sequence: Synthetic oligonucleotide
agcctcaacagacaaggaaac

SEQ ID NO: 38854 - DNA, 21 bp, Artificial Sequence
  Description of Artificial Sequence: Synthetic oligonucleotide
agcctcaacagctacagccca

SEQ ID NO: 38855 - DNA, 21 bp, Artificial Sequence
  Description of Artificial Sequence: Synthetic oligonucleotide
agcctcaacacaggaacaatc

SEQ ID NO: 38856 - DNA, 21 bp, Artificial Sequence
  Description of Artificial Sequence: Synthetic oligonucleotide
agcctcaacacactcggaaca

SEQ ID NO: 38857 - DNA, 21 bp, Artificial Sequence
  Description of Artificial Sequence: Synthetic oligonucleotide
agcctcaacacaatgaacgca

SEQ ID NO: 38858 - DNA, 21 bp, Artificial Sequence
  Description of Artificial Sequence: Synthetic oligonucleotide
agcctcaacacaacaccagaa

SEQ ID NO: 38859 - DNA, 21 bp, Artificial Sequence
  Description of Artificial Sequence: Synthetic oligonucleotide
agcctcaacgtcgcagacgca

SEQ ID NO: 38860 - DNA, 21 bp, Artificial Sequence
  Description of Artificial Sequence: Synthetic oligonucleotide
agcctcccagcacaacaagtc

SEQ ID NO: 38861 - DNA, 21 bp, Artificial Sequence
  Description of Artificial Sequence: Synthetic oligonucleotide
agcctcccagcaagcacactc

SEQ ID NO: 38862 - DNA, 21 bp, Artificial Sequence
  Description of Artificial Sequence: Synthetic oligonucleotide
agcctcccagaaagcaacagc

SEQ ID NO: 38863 - DNA, 21 bp, Artificial Sequence
  Description of Artificial Sequence: Synthetic oligonucleotide
agcctcccaggaagcgtcatg

SEQ ID NO: 38864 - DNA, 21 bp, Artificial Sequence
  Description of Artificial Sequence: Synthetic oligonucleotide
agcctcccaggaacagtcaga

SEQ ID NO: 38865 - DNA, 21 bp, Artificial Sequence
  Description of Artificial Sequence: Synthetic oligonucleotide
agcctcccacacatcagacac

SEQ ID NO: 38866 - DNA, 21 bp, Artificial Sequence
  Description of Artificial Sequence: Synthetic oligonucleotide
agcctcccacacagctgcgga

SEQ ID NO: 38867 - DNA, 21 bp, Artificial Sequence
  Description of Artificial Sequence: Synthetic oligonucleotide
agcctcccaatcggaggaagc

SEQ ID NO: 38868 - DNA, 21 bp, Artificial Sequence
  Description of Artificial Sequence: Synthetic oligonucleotide
agcctcccaaaaccaagccac

SEQ ID NO: 38869 - DNA, 21 bp, Artificial Sequence
  Description of Artificial Sequence: Synthetic oligonucleotide
agcctcccactcaaagtcaac

SEQ ID NO: 38870 - DNA, 21 bp, Artificial Sequence
  Description of Artificial Sequence: Synthetic oligonucleotide
agcctcccactcagagacctc

SEQ ID NO: 38871 - DNA, 21 bp, Artificial Sequence
  Description of Artificial Sequence: Synthetic oligonucleotide
agcctcccaaacatcggaaca

SEQ ID NO: 38872 - DNA, 21 bp, Artificial Sequence
  Description of Artificial Sequence: Synthetic oligonucleotide
agcctcccacaaccaccactc

SEQ ID NO: 38873 - DNA, 21 bp, Artificial Sequence
  Description of Artificial Sequence: Synthetic oligonucleotide
agcctcccacaaacactcaga

SEQ ID NO: 38874 - DNA, 21 bp, Artificial Sequence
  Description of Artificial Sequence: Synthetic oligonucleotide
agcctcccaagaggaagcaac

SEQ ID NO: 38875 - DNA, 21 bp, Artificial Sequence
  Description of Artificial Sequence: Synthetic oligonucleotide
agcctcccaagcctcctcgga

SEQ ID NO: 38876 - DNA, 21 bp, Artificial Sequence
  Description of Artificial Sequence: Synthetic oligonucleotide
agcctcccaagcagcccaagc

SEQ ID NO: 38877 - DNA, 21 bp, Artificial Sequence
  Description of Artificial Sequence: Synthetic oligonucleotide
agcctcccaagcacacacgtc

SEQ ID NO: 38878 - DNA, 21 bp, Artificial Sequence
  Description of Artificial Sequence: Synthetic oligonucleotide
agcctcccaacaggaccaatc

SEQ ID NO: 38879 - DNA, 21 bp, Artificial Sequence
  Description of Artificial Sequence: Synthetic oligonucleotide
agcctcccaacaagcacaatg

SEQ ID NO: 38880 - DNA, 21 bp, Artificial Sequence
  Description of Artificial Sequence: Synthetic oligonucleotide
agcctcccagtcccaagcaga

SEQ ID NO: 38881 - DNA, 21 bp, Artificial Sequence
  Description of Artificial Sequence: Synthetic oligonucleotide
agcctcccagtcagaggagtc

SEQ ID NO: 38882 - DNA, 21 bp, Artificial Sequence
  Description of Artificial Sequence: Synthetic oligonucleotide
agcctcccagtcagcccaagc

SEQ ID NO: 38883 - DNA, 21 bp, Artificial Sequence
  Description of Artificial Sequence: Synthetic oligonucleotide
agcctcccagtcacaggaaga

SEQ ID NO: 38884 - DNA, 21 bp, Artificial Sequence
  Description of Artificial Sequence: Synthetic oligonucleotide
agcctccaattcacaagcagc

SEQ ID NO: 38885 - DNA, 21 bp, Artificial Sequence
  Description of Artificial Sequence: Synthetic oligonucleotide
agcctccaaagagacctcgtc

SEQ ID NO: 38886 - DNA, 21 bp, Artificial Sequence
  Description of Artificial Sequence: Synthetic oligonucleotide
agcctccaaagaccaacaatc

SEQ ID NO: 38887 - DNA, 21 bp, Artificial Sequence
  Description of Artificial Sequence: Synthetic oligonucleotide
agcctccaaagcagcagagga

SEQ ID NO: 38888 - DNA, 21 bp, Artificial Sequence
  Description of Artificial Sequence: Synthetic oligonucleotide
agcctccaaacagacaacgaa

SEQ ID NO: 38889 - DNA, 21 bp, Artificial Sequence
  Description of Artificial Sequence: Synthetic oligonucleotide
agcctccaaacaagcagagtc

SEQ ID NO: 38890 - DNA, 21 bp, Artificial Sequence
  Description of Artificial Sequence: Synthetic oligonucleotide
agcctccaatggacaagcgca

SEQ ID NO: 38891 - DNA, 21 bp, Artificial Sequence
  Description of Artificial Sequence: Synthetic oligonucleotide
agcctcagagcaaacacatac

SEQ ID NO: 38892 - DNA, 21 bp, Artificial Sequence
  Description of Artificial Sequence: Synthetic oligonucleotide
agcctcagagcagtcgtccca

SEQ ID NO: 38893 - DNA, 21 bp, Artificial Sequence
  Description of Artificial Sequence: Synthetic oligonucleotide
agcctcagagacagctaccac

SEQ ID NO: 38894 - DNA, 21 bp, Artificial Sequence
  Description of Artificial Sequence: Synthetic oligonucleotide
agcctcagagaagacgcacaa

SEQ ID NO: 38895 - DNA, 21 bp, Artificial Sequence
  Description of Artificial Sequence: Synthetic oligonucleotide
agcctcagaggaagcagcagc

SEQ ID NO: 38896 - DNA, 21 bp, Artificial Sequence
  Description of Artificial Sequence: Synthetic oligonucleotide
agcctcagacacagcgaaaca

SEQ ID NO: 38897 - DNA, 21 bp, Artificial Sequence
  Description of Artificial Sequence: Synthetic oligonucleotide
agcctcagaatcagcgcaaca

SEQ ID NO: 38898 - DNA, 21 bp, Artificial Sequence
  Description of Artificial Sequence: Synthetic oligonucleotide
agcctcagaccagaccaacac

SEQ ID NO: 38899 - DNA, 21 bp, Artificial Sequence
  Description of Artificial Sequence: Synthetic oligonucleotide
agcctcagaccaaacagcagc

SEQ ID NO: 38900 - DNA, 21 bp, Artificial Sequence
  Description of Artificial Sequence: Synthetic oligonucleotide
agcctcagaagcctcaacagc

SEQ ID NO: 38901 - DNA, 21 bp, Artificial Sequence
  Description of Artificial Sequence: Synthetic oligonucleotide
agcctcagaacaggagactac

SEQ ID NO: 38902 - DNA, 21 bp, Artificial Sequence
  Description of Artificial Sequence: Synthetic oligonucleotide
agcctcagaacaatcgcagca

SEQ ID NO: 38903 - DNA, 21 bp, Artificial Sequence
  Description of Artificial Sequence: Synthetic oligonucleotide
agcctcagaacaaacgtcgtc

SEQ ID NO: 38904 - DNA, 21 bp, Artificial Sequence
  Description of Artificial Sequence: Synthetic oligonucleotide
agcctcagaacaagcatggtc

SEQ ID NO: 38905 - DNA, 21 bp, Artificial Sequence
  Description of Artificial Sequence: Synthetic oligonucleotide
agcctcagagtcgcagaactc

SEQ ID NO: 38906 - DNA, 21 bp, Artificial Sequence
  Description of Artificial Sequence: Synthetic oligonucleotide
agcctcagagtcccagtcgca

SEQ ID NO: 38907 - DNA, 21 bp, Artificial Sequence
  Description of Artificial Sequence: Synthetic oligonucleotide
agcctcagcgcacacgacaga

SEQ ID NO: 38908 - DNA, 21 bp, Artificial Sequence
  Description of Artificial Sequence: Synthetic oligonucleotide
agcctcagcgaaacattcaga

SEQ ID NO: 38909 - DNA, 21 bp, Artificial Sequence
  Description of Artificial Sequence: Synthetic oligonucleotide
agcctcagcggagcaagagca

SEQ ID NO: 38910 - DNA, 21 bp, Artificial Sequence
  Description of Artificial Sequence: Synthetic oligonucleotide
agcctcagcggaaacacagac

SEQ ID NO: 38911 - DNA, 21 bp, Artificial Sequence
  Description of Artificial Sequence: Synthetic oligonucleotide
agcctcagcggaagaccaagc

SEQ ID NO: 38912 - DNA, 21 bp, Artificial Sequence
  Description of Artificial Sequence: Synthetic oligonucleotide
agcctcagccacttcccagca

SEQ ID NO: 38913 - DNA, 21 bp, Artificial Sequence
  Description of Artificial Sequence: Synthetic oligonucleotide
agcctcagccacagcgacgga

SEQ ID NO: 38914 - DNA, 21 bp, Artificial Sequence
  Description of Artificial Sequence: Synthetic oligonucleotide
agcctcagcatcgacaaagca

SEQ ID NO: 38915 - DNA, 21 bp, Artificial Sequence
  Description of Artificial Sequence: Synthetic oligonucleotide
agcctcagcaaaatgccaagc

SEQ ID NO: 38916 - DNA, 21 bp, Artificial Sequence
  Description of Artificial Sequence: Synthetic oligonucleotide
agcctcagcaaaccagtcgga

SEQ ID NO: 38917 - DNA, 21 bp, Artificial Sequence
  Description of Artificial Sequence: Synthetic oligonucleotide
agcctcagcccaagaacattc

SEQ ID NO: 38918 - DNA, 21 bp, Artificial Sequence
  Description of Artificial Sequence: Synthetic oligonucleotide
agcctcagccaaggaagcaac

SEQ ID NO: 38919 - DNA, 21 bp, Artificial Sequence
  Description of Artificial Sequence: Synthetic oligonucleotide
agcctcagcagagcaggacca

SEQ ID NO: 38920 - DNA, 21 bp, Artificial Sequence
  Description of Artificial Sequence: Synthetic oligonucleotide
agcctcagcagcgcaatcgga

SEQ ID NO: 38921 - DNA, 21 bp, Artificial Sequence
  Description of Artificial Sequence: Synthetic oligonucleotide
agcctcagcagcagaaacatc

SEQ ID NO: 38922 - DNA, 21 bp, Artificial Sequence
  Description of Artificial Sequence: Synthetic oligonucleotide
agcctcagcacaacaagcaaa

SEQ ID NO: 38923 - DNA, 21 bp, Artificial Sequence
  Description of Artificial Sequence: Synthetic oligonucleotide
agcctcagcgtcgaaccaaca

SEQ ID NO: 38924 - DNA, 21 bp, Artificial Sequence
  Description of Artificial Sequence: Synthetic oligonucleotide
agcctcagctacgcaaaccac

SEQ ID NO: 38925 - DNA, 21 bp, Artificial Sequence
  Description of Artificial Sequence: Synthetic oligonucleotide
agcctcagctacgcacaagaa

SEQ ID NO: 38926 - DNA, 21 bp, Artificial Sequence
  Description of Artificial Sequence: Synthetic oligonucleotide
agcctcacagcaggaggacac

SEQ ID NO: 38927 - DNA, 21 bp, Artificial Sequence
  Description of Artificial Sequence: Synthetic oligonucleotide
agcctcacattcagcacagga

SEQ ID NO: 38928 - DNA, 21 bp, Artificial Sequence
  Description of Artificial Sequence: Synthetic oligonucleotide
agcctcacaggagacggagtc

SEQ ID NO: 38929 - DNA, 21 bp, Artificial Sequence
  Description of Artificial Sequence: Synthetic oligonucleotide
agcctcacacacatcaaccac

SEQ ID NO: 38930 - DNA, 21 bp, Artificial Sequence
  Description of Artificial Sequence: Synthetic oligonucleotide
agcctcacacacatcccaatg

SEQ ID NO: 38931 - DNA, 21 bp, Artificial Sequence
  Description of Artificial Sequence: Synthetic oligonucleotide
agcctcacaatcgcagcagtc

SEQ ID NO: 38932 - DNA, 21 bp, Artificial Sequence
  Description of Artificial Sequence: Synthetic oligonucleotide
agcctcacaaacgaagcaaaa

SEQ ID NO: 38933 - DNA, 21 bp, Artificial Sequence
  Description of Artificial Sequence: Synthetic oligonucleotide
agcctcacaaacatcgcacaa

SEQ ID NO: 38934 - DNA, 21 bp, Artificial Sequence
  Description of Artificial Sequence: Synthetic oligonucleotide
agcctcacaccaatcatgaga

SEQ ID NO: 38935 - DNA, 21 bp, Artificial Sequence
  Description of Artificial Sequence: Synthetic oligonucleotide
agcctcacaccaagaagcaca

SEQ ID NO: 38936 - DNA, 21 bp, Artificial Sequence
  Description of Artificial Sequence: Synthetic oligonucleotide
agcctcacaccaagcttcgca

SEQ ID NO: 38937 - DNA, 21 bp, Artificial Sequence
  Description of Artificial Sequence: Synthetic oligonucleotide
agcctcacaagcgcaacaaca

SEQ ID NO: 38938 - DNA, 21 bp, Artificial Sequence
  Description of Artificial Sequence: Synthetic oligonucleotide
agcctcacaagcagaccaatg

SEQ ID NO: 38939 - DNA, 21 bp, Artificial Sequence
  Description of Artificial Sequence: Synthetic oligonucleotide
agcctcacaagcacaatgagc

SEQ ID NO: 38940 - DNA, 21 bp, Artificial Sequence
  Description of Artificial Sequence: Synthetic oligonucleotide
agcctcacagtcctcagaaac

SEQ ID NO: 38941 - DNA, 21 bp, Artificial Sequence
  Description of Artificial Sequence: Synthetic oligonucleotide
agcctcacatacgacaacagc

SEQ ID NO: 38942 - DNA, 21 bp, Artificial Sequence
  Description of Artificial Sequence: Synthetic oligonucleotide
agcctcacatacgaaagagac

SEQ ID NO: 38943 - DNA, 21 bp, Artificial Sequence
  Description of Artificial Sequence: Synthetic oligonucleotide
agcctcacatacggagcactc

SEQ ID NO: 38944 - DNA, 21 bp, Artificial Sequence
  Description of Artificial Sequence: Synthetic oligonucleotide
agcctcgtcgaaagaacaagc

SEQ ID NO: 38945 - DNA, 21 bp, Artificial Sequence
  Description of Artificial Sequence: Synthetic oligonucleotide
agcctcgtcggaacagtcgac

SEQ ID NO: 38946 - DNA, 21 bp, Artificial Sequence
  Description of Artificial Sequence: Synthetic oligonucleotide
agcctcgtccacagaagcaca

SEQ ID NO: 38947 - DNA, 21 bp, Artificial Sequence
  Description of Artificial Sequence: Synthetic oligonucleotide
agcctcgtcaacgaaacaagc

SEQ ID NO: 38948 - DNA, 21 bp, Artificial Sequence
  Description of Artificial Sequence: Synthetic oligonucleotide
agcctcgtccaaaaactcagc

SEQ ID NO: 38949 - DNA, 21 bp, Artificial Sequence
  Description of Artificial Sequence: Synthetic oligonucleotide
agcctcgtcagaagcggagac

SEQ ID NO: 38950 - DNA, 21 bp, Artificial Sequence
  Description of Artificial Sequence: Synthetic oligonucleotide
agcctcgtcagaagccaaaac

SEQ ID NO: 38951 - DNA, 21 bp, Artificial Sequence
  Description of Artificial Sequence: Synthetic oligonucleotide
agcctcgtcagcagaatcagc

SEQ ID NO: 38952 - DNA, 21 bp, Artificial Sequence
  Description of Artificial Sequence: Synthetic oligonucleotide
agcctcgtcacagcaggaagc

SEQ ID NO: 38953 - DNA, 21 bp, Artificial Sequence
  Description of Artificial Sequence: Synthetic oligonucleotide
agcctcgtcgtccaaagcgca

SEQ ID NO: 38954 - DNA, 21 bp, Artificial Sequence
  Description of Artificial Sequence: Synthetic oligonucleotide
agcctcgtctacgacccactc

SEQ ID NO: 38955 - DNA, 21 bp, Artificial Sequence
  Description of Artificial Sequence: Synthetic oligonucleotide
agcctctacagcggaaacgtc

SEQ ID NO: 38956 - DNA, 21 bp, Artificial Sequence
  Description of Artificial Sequence: Synthetic oligonucleotide
agcctctacgtcccaaaacac

SEQ ID NO: 38957 - DNA, 21 bp, Artificial Sequence
  Description of Artificial Sequence: Synthetic oligonucleotide
agcctctactacaaagaagaa

SEQ ID NO: 38958 - DNA, 21 bp, Artificial Sequence
  Description of Artificial Sequence: Synthetic oligonucleotide
agcatggcagcaacaccagca

SEQ ID NO: 38959 - DNA, 21 bp, Artificial Sequence
  Description of Artificial Sequence: Synthetic oligonucleotide
agcatggcactcagcggaatc

SEQ ID NO: 38960 - DNA, 21 bp, Artificial Sequence
  Description of Artificial Sequence: Synthetic oligonucleotide
agcatggcagtcagcgtccca

SEQ ID NO: 38961 - DNA, 21 bp, Artificial Sequence
  Description of Artificial Sequence: Synthetic oligonucleotide
agcatggactgcctcagccca

SEQ ID NO: 38962 - DNA, 21 bp, Artificial Sequence
  Description of Artificial Sequence: Synthetic oligonucleotide
agcatggacccaggagcaaga

SEQ ID NO: 38963 - DNA, 21 bp, Artificial Sequence
  Description of Artificial Sequence: Synthetic oligonucleotide
agcatggacagaaaaacagga

SEQ ID NO: 38964 - DNA, 21 bp, Artificial Sequence
  Description of Artificial Sequence: Synthetic oligonucleotide
agcatggacgtcagcgacaca

SEQ ID NO: 38965 - DNA, 21 bp, Artificial Sequence
  Description of Artificial Sequence: Synthetic oligonucleotide
agcatggaaagcagactcctc

SEQ ID NO: 38966 - DNA, 21 bp, Artificial Sequence
  Description of Artificial Sequence: Synthetic oligonucleotide
agcatgggagcaggaccaaca

SEQ ID NO: 38967 - DNA, 21 bp, Artificial Sequence
  Description of Artificial Sequence: Synthetic oligonucleotide
agcatgggagacaacagaaga

SEQ ID NO: 38968 - DNA, 21 bp, Artificial Sequence
  Description of Artificial Sequence: Synthetic oligonucleotide
agcatgggaagcagcgcactc

SEQ ID NO: 38969 - DNA, 21 bp, Artificial Sequence
  Description of Artificial Sequence: Synthetic oligonucleotide
agcatgcacgcactcagcgtc

SEQ ID NO: 38970 - DNA, 21 bp, Artificial Sequence
  Description of Artificial Sequence: Synthetic oligonucleotide
agcatgcaccaaacagtccac

SEQ ID NO: 38971 - DNA, 21 bp, Artificial Sequence
  Description of Artificial Sequence: Synthetic oligonucleotide
agcatgcacagaacaagccca

SEQ ID NO: 38972 - DNA, 21 bp, Artificial Sequence
  Description of Artificial Sequence: Synthetic oligonucleotide
agcatgcacacaacaacaaca

SEQ ID NO: 38973 - DNA, 21 bp, Artificial Sequence
  Description of Artificial Sequence: Synthetic oligonucleotide
agcatgcacgtcccaggagtc

SEQ ID NO: 38974 - DNA, 21 bp, Artificial Sequence
  Description of Artificial Sequence: Synthetic oligonucleotide
agcatgaaagcagtcctcaac

SEQ ID NO: 38975 - DNA, 21 bp, Artificial Sequence
  Description of Artificial Sequence: Synthetic oligonucleotide
agcatgctcgacagcctcctc

SEQ ID NO: 38976 - DNA, 21 bp, Artificial Sequence
  Description of Artificial Sequence: Synthetic oligonucleotide
agcatgctcaacgtcacagtc

SEQ ID NO: 38977 - DNA, 21 bp, Artificial Sequence
  Description of Artificial Sequence: Synthetic oligonucleotide
agcatgctcagcgcaagcctc

SEQ ID NO: 38978 - DNA, 21 bp, Artificial Sequence
  Description of Artificial Sequence: Synthetic oligonucleotide
agcatgatggcagtcaaacca

SEQ ID NO: 38979 - DNA, 21 bp, Artificial Sequence
  Description of Artificial Sequence: Synthetic oligonucleotide
agcatgatggaaccattcaaa

SEQ ID NO: 38980 - DNA, 21 bp, Artificial Sequence
  Description of Artificial Sequence: Synthetic oligonucleotide
agcatgatgaacacagtcgga

SEQ ID NO: 38981 - DNA, 21 bp, Artificial Sequence
  Description of Artificial Sequence: Synthetic oligonucleotide
agcatgatgcaaaaagtccca

SEQ ID NO: 38982 - DNA, 21 bp, Artificial Sequence
  Description of Artificial Sequence: Synthetic oligonucleotide
agcatgatgacaggactcgca

SEQ ID NO: 38983 - DNA, 21 bp, Artificial Sequence
  Description of Artificial Sequence: Synthetic oligonucleotide
agcatgatgtacatcgaacca

SEQ ID NO: 38984 - DNA, 21 bp, Artificial Sequence
  Description of Artificial Sequence: Synthetic oligonucleotide
agcatgaacctcggaagcaca

SEQ ID NO: 38985 - DNA, 21 bp, Artificial Sequence
  Description of Artificial Sequence: Synthetic oligonucleotide
agcatgaacccaggaagcgca

SEQ ID NO: 38986 - DNA, 21 bp, Artificial Sequence
  Description of Artificial Sequence: Synthetic oligonucleotide
agcatgaacccaatgacagtc

SEQ ID NO: 38987 - DNA, 21 bp, Artificial Sequence
  Description of Artificial Sequence: Synthetic oligonucleotide
agcatgaacgtctacgacaca

SEQ ID NO: 38988 - DNA, 21 bp, Artificial Sequence
  Description of Artificial Sequence: Synthetic oligonucleotide
agcatgccattcagcgtcgca

SEQ ID NO: 38989 - DNA, 21 bp, Artificial Sequence
  Description of Artificial Sequence: Synthetic oligonucleotide
agcatgccaggagtcgcaaac

SEQ ID NO: 38990 - DNA, 21 bp, Artificial Sequence
  Description of Artificial Sequence: Synthetic oligonucleotide
agcatgccacacacactcagc

SEQ ID NO: 38991 - DNA, 21 bp, Artificial Sequence
  Description of Artificial Sequence: Synthetic oligonucleotide
agcatgccaatgccaagccca

SEQ ID NO: 38992 - DNA, 21 bp, Artificial Sequence
  Description of Artificial Sequence: Synthetic oligonucleotide
agcatgccaaacgcaccaagc

SEQ ID NO: 38993 - DNA, 21 bp, Artificial Sequence
  Description of Artificial Sequence: Synthetic oligonucleotide
agcatgccaaacccataccaa

SEQ ID NO: 38994 - DNA, 21 bp, Artificial Sequence
  Description of Artificial Sequence: Synthetic oligonucleotide
agcatgccaagagacctcatc

SEQ ID NO: 38995 - DNA, 21 bp, Artificial Sequence
  Description of Artificial Sequence: Synthetic oligonucleotide
agcatgccaagagaaccagga

SEQ ID NO: 38996 - DNA, 21 bp, Artificial Sequence
  Description of Artificial Sequence: Synthetic oligonucleotide
agcatgccaagcccaagagtc

SEQ ID NO: 38997 - DNA, 21 bp, Artificial Sequence
  Description of Artificial Sequence: Synthetic oligonucleotide
agcatgagagcagcagcattc

SEQ ID NO: 38998 - DNA, 21 bp, Artificial Sequence
  Description of Artificial Sequence: Synthetic oligonucleotide
agcatgagagacacagacaga

SEQ ID NO: 38999 - DNA, 21 bp, Artificial Sequence
  Description of Artificial Sequence: Synthetic oligonucleotide
agcatgagaccaagcgacaac

SEQ ID NO: 39000 - DNA, 21 bp, Artificial Sequence
  Description of Artificial Sequence: Synthetic oligonucleotide
agcatgagaagcggagaacca

SEQ ID NO: 39001 - DNA, 21 bp, Artificial Sequence
  Description of Artificial Sequence: Synthetic oligonucleotide
agcatgagaagcagagacaca

SEQ ID NO: 39002 - DNA, 21 bp, Artificial Sequence
  Description of Artificial Sequence: Synthetic oligonucleotide
agcatgagaagcagcccactc

SEQ ID NO: 39003 - DNA, 21 bp, Artificial Sequence
  Description of Artificial Sequence: Synthetic oligonucleotide
agcatgagcggattcgacgtc

SEQ ID NO: 39004 - DNA, 21 bp, Artificial Sequence
  Description of Artificial Sequence: Synthetic oligonucleotide
agcatgagcggaagaatcaca

SEQ ID NO: 39005 - DNA, 21 bp, Artificial Sequence
  Description of Artificial Sequence: Synthetic oligonucleotide
agcatgagcctcagcggactc

SEQ ID NO: 39006 - DNA, 21 bp, Artificial Sequence
  Description of Artificial Sequence: Synthetic oligonucleotide
agcatgagcccaagccaccca

SEQ ID NO: 39007 - DNA, 21 bp, Artificial Sequence
  Description of Artificial Sequence: Synthetic oligonucleotide
agcatgagccaaccaacatac

SEQ ID NO: 39008 - DNA, 21 bp, Artificial Sequence
  Description of Artificial Sequence: Synthetic oligonucleotide
agcatgagcagaccacaacca

SEQ ID NO: 39009 - DNA, 21 bp, Artificial Sequence
  Description of Artificial Sequence: Synthetic oligonucleotide
agcatgagcagcttcccacca

SEQ ID NO: 39010 - DNA, 21 bp, Artificial Sequence
  Description of Artificial Sequence: Synthetic oligonucleotide
agcatgagcgtcgaaccatac

SEQ ID NO: 39011 - DNA, 21 bp, Artificial Sequence
  Description of Artificial Sequence: Synthetic oligonucleotide
agcatgacagcagacctcatc

SEQ ID NO: 39012 - DNA, 21 bp, Artificial Sequence
  Description of Artificial Sequence: Synthetic oligonucleotide
agcatgacagcactcacagca

SEQ ID NO: 39013 - DNA, 21 bp, Artificial Sequence
  Description of Artificial Sequence: Synthetic oligonucleotide
agcatgacaggaccagaactc

SEQ ID NO: 39014 - DNA, 21 bp, Artificial Sequence
  Description of Artificial Sequence: Synthetic oligonucleotide
agcatgacactcggaacagca

SEQ ID NO: 39015 - DNA, 21 bp, Artificial Sequence
  Description of Artificial Sequence: Synthetic oligonucleotide
agcatgacaccaagcgtcaca

SEQ ID NO: 39016 - DNA, 21 bp, Artificial Sequence
  Description of Artificial Sequence: Synthetic oligonucleotide
agcatgacaacaatcggacca

SEQ ID NO: 39017 - DNA, 21 bp, Artificial Sequence
  Description of Artificial Sequence: Synthetic oligonucleotide
agcatggtccaaggaagagtc

SEQ ID NO: 39018 - DNA, 21 bp, Artificial Sequence
  Description of Artificial Sequence: Synthetic oligonucleotide
agcatgtacgcagcaggaagc

SEQ ID NO: 39019 - DNA, 21 bp, Artificial Sequence
  Description of Artificial Sequence: Synthetic oligonucleotide
agcatgtacgacccaagagca

SEQ ID NO: 39020 - DNA, 21 bp, Artificial Sequence
  Description of Artificial Sequence: Synthetic oligonucleotide
agcaacgcagcaatcccactc

SEQ ID NO: 39021 - DNA, 21 bp, Artificial Sequence
  Description of Artificial Sequence: Synthetic oligonucleotide
agcaacgcactcaacatcgga

SEQ ID NO: 39022 - DNA, 21 bp, Artificial Sequence
  Description of Artificial Sequence: Synthetic oligonucleotide
agcaacgcaagagcaccagtc

SEQ ID NO: 39023 - DNA, 21 bp, Artificial Sequence
  Description of Artificial Sequence: Synthetic oligonucleotide
agcaacgcaagaccaccaagc

SEQ ID NO: 39024 - DNA, 21 bp, Artificial Sequence
  Description of Artificial Sequence: Synthetic oligonucleotide
agcaacgcaagccacagcgtc

SEQ ID NO: 39025 - DNA, 21 bp, Artificial Sequence
  Description of Artificial Sequence: Synthetic oligonucleotide
agcaacgcaagcatgatgcac

SEQ ID NO: 39026 - DNA, 21 bp, Artificial Sequence
  Description of Artificial Sequence: Synthetic oligonucleotide
agcaacgcaacaacaccaaca

SEQ ID NO: 39027 - DNA, 21 bp, Artificial Sequence
  Description of Artificial Sequence: Synthetic oligonucleotide
agcaactgcccaaaagactgc

SEQ ID NO: 39028 - DNA, 21 bp, Artificial Sequence
  Description of Artificial Sequence: Synthetic oligonucleotide
agcaactgcagcagcctcaaa

SEQ ID NO: 39029 - DNA, 21 bp, Artificial Sequence
  Description of Artificial Sequence: Synthetic oligonucleotide
agcaacgaaaacagaagcagc

SEQ ID NO: 39030 - DNA, 21 bp, Artificial Sequence
  Description of Artificial Sequence: Synthetic oligonucleotide
agcaacgaaagaacaacaaac

SEQ ID NO: 39031 - DNA, 21 bp, Artificial Sequence
  Description of Artificial Sequence: Synthetic oligonucleotide
agcaacttcacagaagcaatg

SEQ ID NO: 39032 - DNA, 21 bp, Artificial Sequence
  Description of Artificial Sequence: Synthetic oligonucleotide
agcaacggacacgacgcaagc

SEQ ID NO: 39033 - DNA, 21 bp, Artificial Sequence
  Description of Artificial Sequence: Synthetic oligonucleotide
agcaacggacacccaccatgg

SEQ ID NO: 39034 - DNA, 21 bp, Artificial Sequence
  Description of Artificial Sequence: Synthetic oligonucleotide
agcaacggaatcgacagcgga

SEQ ID NO: 39035 - DNA, 21 bp, Artificial Sequence
  Description of Artificial Sequence: Synthetic oligonucleotide
agcaacggactcaacagactc

SEQ ID NO: 39036 - DNA, 21 bp, Artificial Sequence
  Description of Artificial Sequence: Synthetic oligonucleotide
agcaacggaaacagagacagc

SEQ ID NO: 39037 - DNA, 21 bp, Artificial Sequence
  Description of Artificial Sequence: Synthetic oligonucleotide
agcaacggacaaacaagccca

SEQ ID NO: 39038 - DNA, 21 bp, Artificial Sequence
  Description of Artificial Sequence: Synthetic oligonucleotide
agcaacggaagcaaagtcgtc

SEQ ID NO: 39039 - DNA, 21 bp, Artificial Sequence
  Description of Artificial Sequence: Synthetic oligonucleotide
agcaacggaagcccaaaagca

SEQ ID NO: 39040 - DNA, 21 bp, Artificial Sequence
  Description of Artificial Sequence: Synthetic oligonucleotide
agcaacggaagcacatacaaa

SEQ ID NO: 39041 - DNA, 21 bp, Artificial Sequence
  Description of Artificial Sequence: Synthetic oligonucleotide
agcaacggaacaagaagctac

SEQ ID NO: 39042 - DNA, 21 bp, Artificial Sequence
  Description of Artificial Sequence: Synthetic oligonucleotide
agcaaccacgcacacagcctc

SEQ ID NO: 39043 - DNA, 21 bp, Artificial Sequence
  Description of Artificial Sequence: Synthetic oligonucleotide
agcaaccacgaaatcgactac

SEQ ID NO: 39044 - DNA, 21 bp, Artificial Sequence
  Description of Artificial Sequence: Synthetic oligonucleotide
agcaaccacggaggagtcagc

SEQ ID NO: 39045 - DNA, 21 bp, Artificial Sequence
  Description of Artificial Sequence: Synthetic oligonucleotide
agcaacatcggaggaggatac

SEQ ID NO: 39046 - DNA, 21 bp, Artificial Sequence
  Description of Artificial Sequence: Synthetic oligonucleotide
agcaacatcctccaagcaaca

SEQ ID NO: 39047 - DNA, 21 bp, Artificial Sequence
  Description of Artificial Sequence: Synthetic oligonucleotide
agcaacaaagcagcatacgca

SEQ ID NO: 39048 - DNA, 21 bp, Artificial Sequence
  Description of Artificial Sequence: Synthetic oligonucleotide
agcaacaaattcgtcacagca

SEQ ID NO: 39049 - DNA, 21 bp, Artificial Sequence
  Description of Artificial Sequence: Synthetic oligonucleotide
agcaacaaaggactcacagga

SEQ ID NO: 39050 - DNA, 21 bp, Artificial Sequence
  Description of Artificial Sequence: Synthetic oligonucleotide
agcaacaaaggaccagtcaca

SEQ ID NO: 39051 - DNA, 21 bp, Artificial Sequence
  Description of Artificial Sequence: Synthetic oligonucleotide
agcaacaaatacaacgaagtc

SEQ ID NO: 39052 - DNA, 21 bp, Artificial Sequence
  Description of Artificial Sequence: Synthetic oligonucleotide
agcaacctcgaaacaagcaga

SEQ ID NO: 39053 - DNA, 21 bp, Artificial Sequence
  Description of Artificial Sequence: Synthetic oligonucleotide
agcaacctcggattcccagca

SEQ ID NO: 39054 - DNA, 21 bp, Artificial Sequence
  Description of Artificial Sequence: Synthetic oligonucleotide
agcaacctcggaatcagcgca

SEQ ID NO: 39055 - DNA, 21 bp, Artificial Sequence
  Description of Artificial Sequence: Synthetic oligonucleotide
agcaacctcctccacgcaagc

SEQ ID NO: 39056 - DNA, 21 bp, Artificial Sequence
  Description of Artificial Sequence: Synthetic oligonucleotide
agcaacctcagcccagaacaa

SEQ ID NO: 39057 - DNA, 21 bp, Artificial Sequence
  Description of Artificial Sequence: Synthetic oligonucleotide
agcaacctcacaatgagcaac

SEQ ID NO: 39058 - DNA, 21 bp, Artificial Sequence
  Description of Artificial Sequence: Synthetic oligonucleotide
agcaacatggacacaagcaaa

SEQ ID NO: 39059 - DNA, 21 bp, Artificial Sequence
  Description of Artificial Sequence: Synthetic oligonucleotide
agcaacatgatgctcagcgaa

SEQ ID NO: 39060 - DNA, 21 bp, Artificial Sequence
  Description of Artificial Sequence: Synthetic oligonucleotide
agcaacatgagcgtcagcgga

SEQ ID NO: 39061 - DNA, 21 bp, Artificial Sequence
  Description of Artificial Sequence: Synthetic oligonucleotide
agcaacatggtcccaatgagc

SEQ ID NO: 39062 - DNA, 21 bp, Artificial Sequence
  Description of Artificial Sequence: Synthetic oligonucleotide
agcaacaacggagaacacgtc

SEQ ID NO: 39063 - DNA, 21 bp, Artificial Sequence
  Description of Artificial Sequence: Synthetic oligonucleotide
agcaacaaccaaagagtcgtc

SEQ ID NO: 39064 - DNA, 21 bp, Artificial Sequence
  Description of Artificial Sequence: Synthetic oligonucleotide
agcaacccagcactcagcaga

SEQ ID NO: 39065 - DNA, 21 bp, Artificial Sequence
  Description of Artificial Sequence: Synthetic oligonucleotide
agcaacccagcaagctacgtc

SEQ ID NO: 39066 - DNA, 21 bp, Artificial Sequence
  Description of Artificial Sequence: Synthetic oligonucleotide
agcaacccactcagaacactc

SEQ ID NO: 39067 - DNA, 21 bp, Artificial Sequence
  Description of Artificial Sequence: Synthetic oligonucleotide
agcaacccaatgacactcaca

SEQ ID NO: 39068 - DNA, 21 bp, Artificial Sequence
  Description of Artificial Sequence: Synthetic oligonucleotide
agcaacccaccaccactcagc

SEQ ID NO: 39069 - DNA, 21 bp, Artificial Sequence
  Description of Artificial Sequence: Synthetic oligonucleotide
agcaacccaccagtccaaaaa

SEQ ID NO: 39070 - DNA, 21 bp, Artificial Sequence
  Description of Artificial Sequence: Synthetic oligonucleotide
agcaacccaagcgcagcacca

SEQ ID NO: 39071 - DNA, 21 bp, Artificial Sequence
  Description of Artificial Sequence: Synthetic oligonucleotide
agcaaccaacaaggaatggca

SEQ ID NO: 39072 - DNA, 21 bp, Artificial Sequence
  Description of Artificial Sequence: Synthetic oligonucleotide
agcaaccaaagcccaccacca

SEQ ID NO: 39073 - DNA, 21 bp, Artificial Sequence
  Description of Artificial Sequence: Synthetic oligonucleotide
agcaacagcggaagagcacca

SEQ ID NO: 39074 - DNA, 21 bp, Artificial Sequence
  Description of Artificial Sequence: Synthetic oligonucleotide
agcaacagccacagcccagaa

SEQ ID NO: 39075 - DNA, 21 bp, Artificial Sequence
  Description of Artificial Sequence: Synthetic oligonucleotide
agcaacagcatcagcgcagca

SEQ ID NO: 39076 - DNA, 21 bp, Artificial Sequence
  Description of Artificial Sequence: Synthetic oligonucleotide
agcaacagcctcccagtcatg

SEQ ID NO: 39077 - DNA, 21 bp, Artificial Sequence
  Description of Artificial Sequence: Synthetic oligonucleotide
agcaacagcccaagaggatac

SEQ ID NO: 39078 - DNA, 21 bp, Artificial Sequence
  Description of Artificial Sequence: Synthetic oligonucleotide
agcaacagccaaccaaacgtc

SEQ ID NO: 39079 - DNA, 21 bp, Artificial Sequence
  Description of Artificial Sequence: Synthetic oligonucleotide
agcaacagcagagtcgcagga

SEQ ID NO: 39080 - DNA, 21 bp, Artificial Sequence
  Description of Artificial Sequence: Synthetic oligonucleotide
agcaacagcagcgcagtccac

SEQ ID NO: 39081 - DNA, 21 bp, Artificial Sequence
  Description of Artificial Sequence: Synthetic oligonucleotide
agcaacagcacaatcatctac

SEQ ID NO: 39082 - DNA, 21 bp, Artificial Sequence
  Description of Artificial Sequence: Synthetic oligonucleotide
agcaacagctacatgatgctc

SEQ ID NO: 39083 - DNA, 21 bp, Artificial Sequence
  Description of Artificial Sequence: Synthetic oligonucleotide
agcaacacactcagccaactc

SEQ ID NO: 39084 - DNA, 21 bp, Artificial Sequence
  Description of Artificial Sequence: Synthetic oligonucleotide
agcaacacaaacctcagcgaa

SEQ ID NO: 39085 - DNA, 21 bp, Artificial Sequence
  Description of Artificial Sequence: Synthetic oligonucleotide
agcaacacaacagcagcagtc

SEQ ID NO: 39086 - DNA, 21 bp, Artificial Sequence
  Description of Artificial Sequence: Synthetic oligonucleotide
agcaacgtcgcaatcgtccaa

SEQ ID NO: 39087 - DNA, 21 bp, Artificial Sequence
  Description of Artificial Sequence: Synthetic oligonucleotide
agcaacgtcgaaatcatggaa

SEQ ID NO: 39088 - DNA, 21 bp, Artificial Sequence
  Description of Artificial Sequence: Synthetic oligonucleotide
agcaacgtcggaacacacttc

SEQ ID NO: 39089 - DNA, 21 bp, Artificial Sequence
  Description of Artificial Sequence: Synthetic oligonucleotide
agcaacgtccacagcctccac

SEQ ID NO: 39090 - DNA, 21 bp, Artificial Sequence
  Description of Artificial Sequence: Synthetic oligonucleotide
agcaacgtcaacggagcagac

SEQ ID NO: 39091 - DNA, 21 bp, Artificial Sequence
  Description of Artificial Sequence: Synthetic oligonucleotide
agcaacgtcagagaagtcgca

SEQ ID NO: 39092 - DNA, 21 bp, Artificial Sequence
  Description of Artificial Sequence: Synthetic oligonucleotide
agcaacgtcagcccaagacca

SEQ ID NO: 39093 - DNA, 21 bp, Artificial Sequence
  Description of Artificial Sequence: Synthetic oligonucleotide
agcaacgtcgtcgtcctccac

SEQ ID NO: 39094 - DNA, 21 bp, Artificial Sequence
  Description of Artificial Sequence: Synthetic oligonucleotide
agcaactacagcctcaaccac

SEQ ID NO: 39095 - DNA, 21 bp, Artificial Sequence
  Description of Artificial Sequence: Synthetic oligonucleotide
agcccagcagcagaaatcaaa

SEQ ID NO: 39096 - DNA, 21 bp, Artificial Sequence
  Description of Artificial Sequence: Synthetic oligonucleotide
agcccagcactcaacagaagc

SEQ ID NO: 39097 - DNA, 21 bp, Artificial Sequence
  Description of Artificial Sequence: Synthetic oligonucleotide
agcccagcaaaccaatacgac

SEQ ID NO: 39098 - DNA, 21 bp, Artificial Sequence
  Description of Artificial Sequence: Synthetic oligonucleotide
agcccagcaccatacgcactc

SEQ ID NO: 39099 - DNA, 21 bp, Artificial Sequence
  Description of Artificial Sequence: Synthetic oligonucleotide
agcccagcacaaagcgacgac

SEQ ID NO: 39100 - DNA, 21 bp, Artificial Sequence
  Description of Artificial Sequence: Synthetic oligonucleotide
agcccagcaagagcaggatac

SEQ ID NO: 39101 - DNA, 21 bp, Artificial Sequence
  Description of Artificial Sequence: Synthetic oligonucleotide
agcccagcaagaaacctcatc

SEQ ID NO: 39102 - DNA, 21 bp, Artificial Sequence
  Description of Artificial Sequence: Synthetic oligonucleotide
agcccagcaagccaccacaga

SEQ ID NO: 39103 - DNA, 21 bp, Artificial Sequence
  Description of Artificial Sequence: Synthetic oligonucleotide
agcccagcagtcggatgccac

SEQ ID NO: 39104 - DNA, 21 bp, Artificial Sequence
  Description of Artificial Sequence: Synthetic oligonucleotide
agcccatgcccaggagacgca

SEQ ID NO: 39105 - DNA, 21 bp, Artificial Sequence
  Description of Artificial Sequence: Synthetic oligonucleotide
agcccagacctcccaggactc

SEQ ID NO: 39106 - DNA, 21 bp, Artificial Sequence
  Description of Artificial Sequence: Synthetic oligonucleotide
agcccagacctcagaacacca

SEQ ID NO: 39107 - DNA, 21 bp, Artificial Sequence
  Description of Artificial Sequence: Synthetic oligonucleotide
agcccagacagagcacaactc

SEQ ID NO: 39108 - DNA, 21 bp, Artificial Sequence
  Description of Artificial Sequence: Synthetic oligonucleotide
agcccagacagcaacggacca

SEQ ID NO: 39109 - DNA, 21 bp, Artificial Sequence
  Description of Artificial Sequence: Synthetic oligonucleotide
agcccagacgtcgtcgtcagc

SEQ ID NO: 39110 - DNA, 21 bp, Artificial Sequence
  Description of Artificial Sequence: Synthetic oligonucleotide
agcccagaattcggaacagga

SEQ ID NO: 39111 - DNA, 21 bp, Artificial Sequence
  Description of Artificial Sequence: Synthetic oligonucleotide
agcccagaactcccaaaagca

SEQ ID NO: 39112 - DNA, 21 bp, Artificial Sequence
  Description of Artificial Sequence: Synthetic oligonucleotide
agcccagaaagcagaatgcca

SEQ ID NO: 39113 - DNA, 21 bp, Artificial Sequence
  Description of Artificial Sequence: Synthetic oligonucleotide
agcccattcgacgcaaacgtc

SEQ ID NO: 39114 - DNA, 21 bp, Artificial Sequence
  Description of Artificial Sequence: Synthetic oligonucleotide
agcccattcccaccacaactc

SEQ ID NO: 39115 - DNA, 21 bp, Artificial Sequence
  Description of Artificial Sequence: Synthetic oligonucleotide
agcccattcagagaccaagaa

SEQ ID NO: 39116 - DNA, 21 bp, Artificial Sequence
  Description of Artificial Sequence: Synthetic oligonucleotide
agcccattcacaatgagacca

SEQ ID NO: 39117 - DNA, 21 bp, Artificial Sequence
  Description of Artificial Sequence: Synthetic oligonucleotide
agcccaggagacccagcagaa

SEQ ID NO: 39118 - DNA, 21 bp, Artificial Sequence
  Description of Artificial Sequence: Synthetic oligonucleotide
agcccaggaggacacgtcagc

SEQ ID NO: 39119 - DNA, 21 bp, Artificial Sequence
  Description of Artificial Sequence: Synthetic oligonucleotide
agcccaggacacccaccaagc

SEQ ID NO: 39120 - DNA, 21 bp, Artificial Sequence
  Description of Artificial Sequence: Synthetic oligonucleotide
agcccaggaatcagagacttc

SEQ ID NO: 39121 - DNA, 21 bp, Artificial Sequence
  Description of Artificial Sequence: Synthetic oligonucleotide
agcccaggaatcagcagactc

SEQ ID NO: 39122 - DNA, 21 bp, Artificial Sequence
  Description of Artificial Sequence: Synthetic oligonucleotide
agcccaggaccacacaaaagc

SEQ ID NO: 39123 - DNA, 21 bp, Artificial Sequence
  Description of Artificial Sequence: Synthetic oligonucleotide
agcccaggaagcggaaaaagc

SEQ ID NO: 39124 - DNA, 21 bp, Artificial Sequence
  Description of Artificial Sequence: Synthetic oligonucleotide
agcccaggaagcccaatgagc

SEQ ID NO: 39125 - DNA, 21 bp, Artificial Sequence
  Description of Artificial Sequence: Synthetic oligonucleotide
agcccaggaacactcccaaca

SEQ ID NO: 39126 - DNA, 21 bp, Artificial Sequence
  Description of Artificial Sequence: Synthetic oligonucleotide
agcccaggagtcatgccagga

SEQ ID NO: 39127 - DNA, 21 bp, Artificial Sequence
  Description of Artificial Sequence: Synthetic oligonucleotide
agcccacacgacgaaacaagc

SEQ ID NO: 39128 - DNA, 21 bp, Artificial Sequence
  Description of Artificial Sequence: Synthetic oligonucleotide
agcccacacgacagcccactc

SEQ ID NO: 39129 - DNA, 21 bp, Artificial Sequence
  Description of Artificial Sequence: Synthetic oligonucleotide
agcccacacatcacacacatg

SEQ ID NO: 39130 - DNA, 21 bp, Artificial Sequence
  Description of Artificial Sequence: Synthetic oligonucleotide
agcccacacaaaaacgcacac

SEQ ID NO: 39131 - DNA, 21 bp, Artificial Sequence
  Description of Artificial Sequence: Synthetic oligonucleotide
agcccacacctcagaggagca

SEQ ID NO: 39132 - DNA, 21 bp, Artificial Sequence
  Description of Artificial Sequence: Synthetic oligonucleotide
agcccacacccagaaaaccac

SEQ ID NO: 39133 - DNA, 21 bp, Artificial Sequence
  Description of Artificial Sequence: Synthetic oligonucleotide
agcccaatcgaaagaagaaca

SEQ ID NO: 39134 - DNA, 21 bp, Artificial Sequence
  Description of Artificial Sequence: Synthetic oligonucleotide
agcccaatccaaacaaacagc

SEQ ID NO: 39135 - DNA, 21 bp, Artificial Sequence
  Description of Artificial Sequence: Synthetic oligonucleotide
agcccaatccaaacacaagga

SEQ ID NO: 39136 - DNA, 21 bp, Artificial Sequence
  Description of Artificial Sequence: Synthetic oligonucleotide
agcccaatcagcatcaaaaac

SEQ ID NO: 39137 - DNA, 21 bp, Artificial Sequence
  Description of Artificial Sequence: Synthetic oligonucleotide
agcccaatcacaccaggaaga

SEQ ID NO: 39138 - DNA, 21 bp, Artificial Sequence
  Description of Artificial Sequence: Synthetic oligonucleotide
agcccaatcacatacaacaca

SEQ ID NO: 39139 - DNA, 21 bp, Artificial Sequence
  Description of Artificial Sequence: Synthetic oligonucleotide
agcccaaaaatcccaacacac

SEQ ID NO: 39140 - DNA, 21 bp, Artificial Sequence
  Description of Artificial Sequence: Synthetic oligonucleotide
agcccaaaaatcccatggaca

SEQ ID NO: 39141 - DNA, 21 bp, Artificial Sequence
  Description of Artificial Sequence: Synthetic oligonucleotide
agcccaaaaatgctcagaagc

SEQ ID NO: 39142 - DNA, 21 bp, Artificial Sequence
  Description of Artificial Sequence: Synthetic oligonucleotide
agcccaaaagtcgcaggagtc

SEQ ID NO: 39143 - DNA, 21 bp, Artificial Sequence
  Description of Artificial Sequence: Synthetic oligonucleotide
agcccactcgcagaagcaaga

SEQ ID NO: 39144 - DNA, 21 bp, Artificial Sequence
  Description of Artificial Sequence: Synthetic oligonucleotide
agcccactcgcaacaagagtc

SEQ ID NO: 39145 - DNA, 21 bp, Artificial Sequence
  Description of Artificial Sequence: Synthetic oligonucleotide
agcccactcatcgtcaacaca

SEQ ID NO: 39146 - DNA, 21 bp, Artificial Sequence
  Description of Artificial Sequence: Synthetic oligonucleotide
agcccactcctcctcgcaagc

SEQ ID NO: 39147 - DNA, 21 bp, Artificial Sequence
  Description of Artificial Sequence: Synthetic oligonucleotide
agcccactcccaccaagcaac

SEQ ID NO: 39148 - DNA, 21 bp, Artificial Sequence
  Description of Artificial Sequence: Synthetic oligonucleotide
agcccactcagagaaagagtc

SEQ ID NO: 39149 - DNA, 21 bp, Artificial Sequence
  Description of Artificial Sequence: Synthetic oligonucleotide
agcccactcagaagcgacgtc

SEQ ID NO: 39150 - DNA, 21 bp, Artificial Sequence
  Description of Artificial Sequence: Synthetic oligonucleotide
agcccactcacagacctcagc

SEQ ID NO: 39151 - DNA, 21 bp, Artificial Sequence
  Description of Artificial Sequence: Synthetic oligonucleotide
agcccactcacagacagctac

SEQ ID NO: 39152 - DNA, 21 bp, Artificial Sequence
  Description of Artificial Sequence: Synthetic oligonucleotide
agcccactcacaacagtccca

SEQ ID NO: 39153 - DNA, 21 bp, Artificial Sequence
  Description of Artificial Sequence: Synthetic oligonucleotide
agcccactcgtcagcacagca

SEQ ID NO: 39154 - DNA, 21 bp, Artificial Sequence
  Description of Artificial Sequence: Synthetic oligonucleotide
agcccaatgaaagcaggaaca

SEQ ID NO: 39155 - DNA, 21 bp, Artificial Sequence
  Description of Artificial Sequence: Synthetic oligonucleotide
agcccaatgagaatcgaacca

SEQ ID NO: 39156 - DNA, 21 bp, Artificial Sequence
  Description of Artificial Sequence: Synthetic oligonucleotide
agcccaatgagaccacaagaa

SEQ ID NO: 39157 - DNA, 21 bp, Artificial Sequence
  Description of Artificial Sequence: Synthetic oligonucleotide
agcccaaacgcactcctcgac

SEQ ID NO: 39158 - DNA, 21 bp, Artificial Sequence
  Description of Artificial Sequence: Synthetic oligonucleotide
agcccaaacgcaacaacagac

SEQ ID NO: 39159 - DNA, 21 bp, Artificial Sequence
  Description of Artificial Sequence: Synthetic oligonucleotide
agcccaaacatggacagactc

SEQ ID NO: 39160 - DNA, 21 bp, Artificial Sequence
  Description of Artificial Sequence: Synthetic oligonucleotide
agcccaaacatgggacaattc

SEQ ID NO: 39161 - DNA, 21 bp, Artificial Sequence
  Description of Artificial Sequence: Synthetic oligonucleotide
agcccaaacagagaaagcatg

SEQ ID NO: 39162 - DNA, 21 bp, Artificial Sequence
  Description of Artificial Sequence: Synthetic oligonucleotide
agcccaaacacaccaacattc

SEQ ID NO: 39163 - DNA, 21 bp, Artificial Sequence
  Description of Artificial Sequence: Synthetic oligonucleotide
agcccaaacacaagaacagca

SEQ ID NO: 39164 - DNA, 21 bp, Artificial Sequence
  Description of Artificial Sequence: Synthetic oligonucleotide
agcccaccaaacttcccagaa

SEQ ID NO: 39165 - DNA, 21 bp, Artificial Sequence
  Description of Artificial Sequence: Synthetic oligonucleotide
agcccaccacaagcaaacgca

SEQ ID NO: 39166 - DNA, 21 bp, Artificial Sequence
  Description of Artificial Sequence: Synthetic oligonucleotide
agcccaccacaagtcacaaaa

SEQ ID NO: 39167 - DNA, 21 bp, Artificial Sequence
  Description of Artificial Sequence: Synthetic oligonucleotide
agcccaccaagaaacatggaa

SEQ ID NO: 39168 - DNA, 21 bp, Artificial Sequence
  Description of Artificial Sequence: Synthetic oligonucleotide
agcccaccaagagtcggactc

SEQ ID NO: 39169 - DNA, 21 bp, Artificial Sequence
  Description of Artificial Sequence: Synthetic oligonucleotide
agcccaccaacagcaagagac

SEQ ID NO: 39170 - DNA, 21 bp, Artificial Sequence
  Description of Artificial Sequence: Synthetic oligonucleotide
agcccaccagtcagcttcgaa

SEQ ID NO: 39171 - DNA, 21 bp, Artificial Sequence
  Description of Artificial Sequence: Synthetic oligonucleotide
agcccacaaggaaacggagca

SEQ ID NO: 39172 - DNA, 21 bp, Artificial Sequence
  Description of Artificial Sequence: Synthetic oligonucleotide
agcccacaaggaacatacgtc

SEQ ID NO: 39173 - DNA, 21 bp, Artificial Sequence
  Description of Artificial Sequence: Synthetic oligonucleotide
agcccacaaatcacaagacca

SEQ ID NO: 39174 - DNA, 21 bp, Artificial Sequence
  Description of Artificial Sequence: Synthetic oligonucleotide
agcccacaaagaatcgaagac

SEQ ID NO: 39175 - DNA, 21 bp, Artificial Sequence
  Description of Artificial Sequence: Synthetic oligonucleotide
agcccacaaagaccaatgaac

SEQ ID NO: 39176 - DNA, 21 bp, Artificial Sequence
  Description of Artificial Sequence: Synthetic oligonucleotide
agcccaagagcaagaatcgac

SEQ ID NO: 39177 - DNA, 21 bp, Artificial Sequence
  Description of Artificial Sequence: Synthetic oligonucleotide
agcccaagagacccagaaatc

SEQ ID NO: 39178 - DNA, 21 bp, Artificial Sequence
  Description of Artificial Sequence: Synthetic oligonucleotide
agcccaagagaatgcggactc

SEQ ID NO: 39179 - DNA, 21 bp, Artificial Sequence
  Description of Artificial Sequence: Synthetic oligonucleotide
agcccaagaggaatgggactc

SEQ ID NO: 39180 - DNA, 21 bp, Artificial Sequence
  Description of Artificial Sequence: Synthetic oligonucleotide
agcccaagaggaatgccactc

SEQ ID NO: 39181 - DNA, 21 bp, Artificial Sequence
  Description of Artificial Sequence: Synthetic oligonucleotide
agcccaagacacaacctcgga

SEQ ID NO: 39182 - DNA, 21 bp, Artificial Sequence
  Description of Artificial Sequence: Synthetic oligonucleotide
agcccaagaatcagagacgac

SEQ ID NO: 39183 - DNA, 21 bp, Artificial Sequence
  Description of Artificial Sequence: Synthetic oligonucleotide
agcccaagaccaagctacgca

SEQ ID NO: 39184 - DNA, 21 bp, Artificial Sequence
  Description of Artificial Sequence: Synthetic oligonucleotide
agcccaagacaactcagcgtc

SEQ ID NO: 39185 - DNA, 21 bp, Artificial Sequence
  Description of Artificial Sequence: Synthetic oligonucleotide
agcccaagacaaaacatccca

SEQ ID NO: 39186 - DNA, 21 bp, Artificial Sequence
  Description of Artificial Sequence: Synthetic oligonucleotide
agcccaagacaaagcatcagc

SEQ ID NO: 39187 - DNA, 21 bp, Artificial Sequence
  Description of Artificial Sequence: Synthetic oligonucleotide
agcccaagaacagcactccca

SEQ ID NO: 39188 - DNA, 21 bp, Artificial Sequence
  Description of Artificial Sequence: Synthetic oligonucleotide
agcccaagaacaggactcgga

SEQ ID NO: 39189 - DNA, 21 bp, Artificial Sequence
  Description of Artificial Sequence: Synthetic oligonucleotide
agcccaagatggcacgaagac

SEQ ID NO: 39190 - DNA, 21 bp, Artificial Sequence
  Description of Artificial Sequence: Synthetic oligonucleotide
agcccaagcgcactcctccac

SEQ ID NO: 39191 - DNA, 21 bp, Artificial Sequence
  Description of Artificial Sequence: Synthetic oligonucleotide
agcccaagcgcaatgggaatc

SEQ ID NO: 39192 - DNA, 21 bp, Artificial Sequence
  Description of Artificial Sequence: Synthetic oligonucleotide
agcccaagcggaaacaacgga

SEQ ID NO: 39193 - DNA, 21 bp, Artificial Sequence
  Description of Artificial Sequence: Synthetic oligonucleotide
agcccaagcggaccagtcaga

SEQ ID NO: 39194 - DNA, 21 bp, Artificial Sequence
  Description of Artificial Sequence: Synthetic oligonucleotide
agcccaagcggaagcctcgca

SEQ ID NO: 39195 - DNA, 21 bp, Artificial Sequence
  Description of Artificial Sequence: Synthetic oligonucleotide
agcccaagcggagtcgcagga

SEQ ID NO: 39196 - DNA, 21 bp, Artificial Sequence
  Description of Artificial Sequence: Synthetic oligonucleotide
agcccaagcctcagcagaagc

SEQ ID NO: 39197 - DNA, 21 bp, Artificial Sequence
  Description of Artificial Sequence: Synthetic oligonucleotide
agcccaagcctcacagcagga

SEQ ID NO: 39198 - DNA, 21 bp, Artificial Sequence
  Description of Artificial Sequence: Synthetic oligonucleotide
agcccaagcctcacaagcgac

SEQ ID NO: 39199 - DNA, 21 bp, Artificial Sequence
  Description of Artificial Sequence: Synthetic oligonucleotide
agcccaagcatgccagcaaga

SEQ ID NO: 39200 - DNA, 21 bp, Artificial Sequence
  Description of Artificial Sequence: Synthetic oligonucleotide
agcccaagcagacacgaaatc

SEQ ID NO: 39201 - DNA, 21 bp, Artificial Sequence
  Description of Artificial Sequence: Synthetic oligonucleotide
agcccaagcagaatgaacagc

SEQ ID NO: 39202 - DNA, 21 bp, Artificial Sequence
  Description of Artificial Sequence: Synthetic oligonucleotide
agcccaagcagaccaagcaca

SEQ ID NO: 39203 - DNA, 21 bp, Artificial Sequence
  Description of Artificial Sequence: Synthetic oligonucleotide
agcccaagcagaacaagcctc

SEQ ID NO: 39204 - DNA, 21 bp, Artificial Sequence
  Description of Artificial Sequence: Synthetic oligonucleotide
agcccaagcagcctcaaagaa

SEQ ID NO: 39205 - DNA, 21 bp, Artificial Sequence
  Description of Artificial Sequence: Synthetic oligonucleotide
agcccaagcacaggaaaactc

SEQ ID NO: 39206 - DNA, 21 bp, Artificial Sequence
  Description of Artificial Sequence: Synthetic oligonucleotide
agcccaagcacactcccacca

SEQ ID NO: 39207 - DNA, 21 bp, Artificial Sequence
  Description of Artificial Sequence: Synthetic oligonucleotide
agcccaagcacaaacaacaca

SEQ ID NO: 39208 - DNA, 21 bp, Artificial Sequence
  Description of Artificial Sequence: Synthetic oligonucleotide
agcccaagcacaagaatggga

SEQ ID NO: 39209 - DNA, 21 bp, Artificial Sequence
  Description of Artificial Sequence: Synthetic oligonucleotide
agcccaagcgtcgcataccac

SEQ ID NO: 39210 - DNA, 21 bp, Artificial Sequence
  Description of Artificial Sequence: Synthetic oligonucleotide
agcccaagcgtcgaactcttc

SEQ ID NO: 39211 - DNA, 21 bp, Artificial Sequence
  Description of Artificial Sequence: Synthetic oligonucleotide
agcccaacagcaaaaatgtgg

SEQ ID NO: 39212 - DNA, 21 bp, Artificial Sequence
  Description of Artificial Sequence: Synthetic oligonucleotide
agcccaacatgcgtcgcatgc

SEQ ID NO: 39213 - DNA, 21 bp, Artificial Sequence
  Description of Artificial Sequence: Synthetic oligonucleotide
agcccaacagacttcatgaac

SEQ ID NO: 39214 - DNA, 21 bp, Artificial Sequence
  Description of Artificial Sequence: Synthetic oligonucleotide
agcccaacattcgtcggaaca

SEQ ID NO: 39215 - DNA, 21 bp, Artificial Sequence
  Description of Artificial Sequence: Synthetic oligonucleotide
agcccaacaggagtccaacca

SEQ ID NO: 39216 - DNA, 21 bp, Artificial Sequence
  Description of Artificial Sequence: Synthetic oligonucleotide
agcccaacaatcacagcaaga

SEQ ID NO: 39217 - DNA, 21 bp, Artificial Sequence
  Description of Artificial Sequence: Synthetic oligonucleotide
agcccaacactcagcccagga

SEQ ID NO: 39218 - DNA, 21 bp, Artificial Sequence
  Description of Artificial Sequence: Synthetic oligonucleotide
agcccaacaagaaacatcgtc

SEQ ID NO: 39219 - DNA, 21 bp, Artificial Sequence
  Description of Artificial Sequence: Synthetic oligonucleotide
agcccaacaagcagcgtcaca

SEQ ID NO: 39220 - DNA, 21 bp, Artificial Sequence
  Description of Artificial Sequence: Synthetic oligonucleotide
agcccaacaacacaaagaaca

SEQ ID NO: 39221 - DNA, 21 bp, Artificial Sequence
  Description of Artificial Sequence: Synthetic oligonucleotide
agcccaacagtcaacccaatc

SEQ ID NO: 39222 - DNA, 21 bp, Artificial Sequence
  Description of Artificial Sequence: Synthetic oligonucleotide
agcccaacagtcgtcctcgca

SEQ ID NO: 39223 - DNA, 21 bp, Artificial Sequence
  Description of Artificial Sequence: Synthetic oligonucleotide
agcccaacatacacaatcgac

SEQ ID NO: 39224 - DNA, 21 bp, Artificial Sequence
  Description of Artificial Sequence: Synthetic oligonucleotide
agcccagtcgcaagaaacaac

SEQ ID NO: 39225 - DNA, 21 bp, Artificial Sequence
  Description of Artificial Sequence: Synthetic oligonucleotide
agcccagtcggaggaaaagac

SEQ ID NO: 39226 - DNA, 21 bp, Artificial Sequence
  Description of Artificial Sequence: Synthetic oligonucleotide
agcccagtcggaagcagcgga

SEQ ID NO: 39227 - DNA, 21 bp, Artificial Sequence
  Description of Artificial Sequence: Synthetic oligonucleotide
agcccagtcatgctccaaagc

SEQ ID NO: 39228 - DNA, 21 bp, Artificial Sequence
  Description of Artificial Sequence: Synthetic oligonucleotide
agcccagtcagacacccaagc

SEQ ID NO: 39229 - DNA, 21 bp, Artificial Sequence
  Description of Artificial Sequence: Synthetic oligonucleotide
agcccagtcagcgacaaccca

SEQ ID NO: 39230 - DNA, 21 bp, Artificial Sequence
  Description of Artificial Sequence: Synthetic oligonucleotide
agcccagtcgtcgcacaacca

SEQ ID NO: 39231 - DNA, 21 bp, Artificial Sequence
  Description of Artificial Sequence: Synthetic oligonucleotide
agcccagtcgtcccaagagca

SEQ ID NO: 39232 - DNA, 21 bp, Artificial Sequence
  Description of Artificial Sequence: Synthetic oligonucleotide
agcccatacggacaccaaaac

SEQ ID NO: 39233 - DNA, 21 bp, Artificial Sequence
  Description of Artificial Sequence: Synthetic oligonucleotide
agcccatacaaacaaaacagc

SEQ ID NO: 39234 - DNA, 21 bp, Artificial Sequence
  Description of Artificial Sequence: Synthetic oligonucleotide
agcccatacaacatcacaagc

SEQ ID NO: 39235 - DNA, 21 bp, Artificial Sequence
  Description of Artificial Sequence: Synthetic oligonucleotide
agcccatacccagcactcctc

SEQ ID NO: 39236 - DNA, 21 bp, Artificial Sequence
  Description of Artificial Sequence: Synthetic oligonucleotide
agccaagcaggagcaatccca

SEQ ID NO: 39237 - DNA, 21 bp, Artificial Sequence
  Description of Artificial Sequence: Synthetic oligonucleotide
agccaagcaatgcaaacactc

SEQ ID NO: 39238 - DNA, 21 bp, Artificial Sequence
  Description of Artificial Sequence: Synthetic oligonucleotide
agccaagcaccaagagaccca

SEQ ID NO: 39239 - DNA, 21 bp, Artificial Sequence
  Description of Artificial Sequence: Synthetic oligonucleotide
agccaagcaacaggaagaagc

SEQ ID NO: 39240 - DNA, 21 bp, Artificial Sequence
  Description of Artificial Sequence: Synthetic oligonucleotide
agccaagcaacacaacacaac

SEQ ID NO: 39241 - DNA, 21 bp, Artificial Sequence
  Description of Artificial Sequence: Synthetic oligonucleotide
agccaagcagtcccaccaagc

SEQ ID NO: 39242 - DNA, 21 bp, Artificial Sequence
  Description of Artificial Sequence: Synthetic oligonucleotide
agccaagacatgtacagagga

SEQ ID NO: 39243 - DNA, 21 bp, Artificial Sequence
  Description of Artificial Sequence: Synthetic oligonucleotide
agccaagacaacgtccaagaa

SEQ ID NO: 39244 - DNA, 21 bp, Artificial Sequence
  Description of Artificial Sequence: Synthetic oligonucleotide
agccaagactggaacctcaca

SEQ ID NO: 39245 - DNA, 21 bp, Artificial Sequence
  Description of Artificial Sequence: Synthetic oligonucleotide
agccaagaactcccaggaagc

SEQ ID NO: 39246 - DNA, 21 bp, Artificial Sequence
  Description of Artificial Sequence: Synthetic oligonucleotide
agccaagaaagctacatggac

SEQ ID NO: 39247 - DNA, 21 bp, Artificial Sequence
  Description of Artificial Sequence: Synthetic oligonucleotide
agccaattcgaagcaagacca

SEQ ID NO: 39248 - DNA, 21 bp, Artificial Sequence
  Description of Artificial Sequence: Synthetic oligonucleotide
agccaattcaaaccaacattc

SEQ ID NO: 39249 - DNA, 21 bp, Artificial Sequence
  Description of Artificial Sequence: Synthetic oligonucleotide
agccaattcctcgcagacatc

SEQ ID NO: 39250 - DNA, 21 bp, Artificial Sequence
  Description of Artificial Sequence: Synthetic oligonucleotide
agccaaggagcaagaaacgac

SEQ ID NO: 39251 - DNA, 21 bp, Artificial Sequence
  Description of Artificial Sequence: Synthetic oligonucleotide
agccaaggattcaacagcagc

SEQ ID NO: 39252 - DNA, 21 bp, Artificial Sequence
  Description of Artificial Sequence: Synthetic oligonucleotide
agccaaggacacgcactccca

SEQ ID NO: 39253 - DNA, 21 bp, Artificial Sequence
  Description of Artificial Sequence: Synthetic oligonucleotide
agccaaggaagcgtccaagga

SEQ ID NO: 39254 - DNA, 21 bp, Artificial Sequence
  Description of Artificial Sequence: Synthetic oligonucleotide
agccaaggagtcagagtcgga

SEQ ID NO: 39255 - DNA, 21 bp, Artificial Sequence
  Description of Artificial Sequence: Synthetic oligonucleotide
agccaacacctcagcgtcaac

SEQ ID NO: 39256 - DNA, 21 bp, Artificial Sequence
  Description of Artificial Sequence: Synthetic oligonucleotide
agccaacacccaatcagagaa

SEQ ID NO: 39257 - DNA, 21 bp, Artificial Sequence
  Description of Artificial Sequence: Synthetic oligonucleotide
agccaacacccaccaggagac

SEQ ID NO: 39258 - DNA, 21 bp, Artificial Sequence
  Description of Artificial Sequence: Synthetic oligonucleotide
agccaacacagagaccaccca

SEQ ID NO: 39259 - DNA, 21 bp, Artificial Sequence
  Description of Artificial Sequence: Synthetic oligonucleotide
agccaacacgtcgcaagccca

SEQ ID NO: 39260 - DNA, 21 bp, Artificial Sequence
  Description of Artificial Sequence: Synthetic oligonucleotide
agccaaatcagctgcggactc

SEQ ID NO: 39261 - DNA, 21 bp, Artificial Sequence
  Description of Artificial Sequence: Synthetic oligonucleotide
agccaaaaaccaatggtcgca

SEQ ID NO: 39262 - DNA, 21 bp, Artificial Sequence
  Description of Artificial Sequence: Synthetic oligonucleotide
agccaaaaaagccacggaaac

SEQ ID NO: 39263 - DNA, 21 bp, Artificial Sequence
  Description of Artificial Sequence: Synthetic oligonucleotide
agccaactcgacatcaacgga

SEQ ID NO: 39264 - DNA, 21 bp, Artificial Sequence
  Description of Artificial Sequence: Synthetic oligonucleotide
agccaaatggacgacacactc

SEQ ID NO: 39265 - DNA, 21 bp, Artificial Sequence
  Description of Artificial Sequence: Synthetic oligonucleotide
agccaaatgctcccagcacca

SEQ ID NO: 39266 - DNA, 21 bp, Artificial Sequence
  Description of Artificial Sequence: Synthetic oligonucleotide
agccaaatgctcacaggacca

SEQ ID NO: 39267 - DNA, 21 bp, Artificial Sequence
  Description of Artificial Sequence: Synthetic oligonucleotide
agccaaatgagagaaccagtc

SEQ ID NO: 39268 - DNA, 21 bp, Artificial Sequence
  Description of Artificial Sequence: Synthetic oligonucleotide
agccaaaacctcgtcatcagc

SEQ ID NO: 39269 - DNA, 21 bp, Artificial Sequence
  Description of Artificial Sequence: Synthetic oligonucleotide
agccaaaacagcctcagcgaa

SEQ ID NO: 39270 - DNA, 21 bp, Artificial Sequence
  Description of Artificial Sequence: Synthetic oligonucleotide
agccaaaacacaggacaaaac

SEQ ID NO: 39271 - DNA, 21 bp, Artificial Sequence
  Description of Artificial Sequence: Synthetic oligonucleotide
agccaaccacacttcgcaagc

SEQ ID NO: 39272 - DNA, 21 bp, Artificial Sequence
  Description of Artificial Sequence: Synthetic oligonucleotide
agccaaccaatggcaagaatg

SEQ ID NO: 39273 - DNA, 21 bp, Artificial Sequence
  Description of Artificial Sequence: Synthetic oligonucleotide
agccaaccaatgccaccagca

SEQ ID NO: 39274 - DNA, 21 bp, Artificial Sequence
  Description of Artificial Sequence: Synthetic oligonucleotide
agccaaccaaacccagcagtc

SEQ ID NO: 39275 - DNA, 21 bp, Artificial Sequence
  Description of Artificial Sequence: Synthetic oligonucleotide
agccaaccaacaacagcaaga

SEQ ID NO: 39276 - DNA, 21 bp, Artificial Sequence
  Description of Artificial Sequence: Synthetic oligonucleotide
agccaaccagtcacagcagga

SEQ ID NO: 39277 - DNA, 21 bp, Artificial Sequence
  Description of Artificial Sequence: Synthetic oligonucleotide
agccaacaagacccaatcctc

SEQ ID NO: 39278 - DNA, 21 bp, Artificial Sequence
  Description of Artificial Sequence: Synthetic oligonucleotide
agccaaagagcaccaatccca

SEQ ID NO: 39279 - DNA, 21 bp, Artificial Sequence
  Description of Artificial Sequence: Synthetic oligonucleotide
agccaaagagcaacagcactc

SEQ ID NO: 39280 - DNA, 21 bp, Artificial Sequence
  Description of Artificial Sequence: Synthetic oligonucleotide
agccaaagaatcctcgacaca

SEQ ID NO: 39281 - DNA, 21 bp, Artificial Sequence
  Description of Artificial Sequence: Synthetic oligonucleotide
agccaaagaagcggaagagaa

SEQ ID NO: 39282 - DNA, 21 bp, Artificial Sequence
  Description of Artificial Sequence: Synthetic oligonucleotide
agccaaagaagcacactcaca

SEQ ID NO: 39283 - DNA, 21 bp, Artificial Sequence
  Description of Artificial Sequence: Synthetic oligonucleotide
agccaaagagtcgcaagcgaa

SEQ ID NO: 39284 - DNA, 21 bp, Artificial Sequence
  Description of Artificial Sequence: Synthetic oligonucleotide
agccaaagagtcagccaaagc

SEQ ID NO: 39285 - DNA, 21 bp, Artificial Sequence
  Description of Artificial Sequence: Synthetic oligonucleotide
agccaaagcttcagcgtcgac

SEQ ID NO: 39286 - DNA, 21 bp, Artificial Sequence
  Description of Artificial Sequence: Synthetic oligonucleotide
agccaaagcggaagcagcaac

SEQ ID NO: 39287 - DNA, 21 bp, Artificial Sequence
  Description of Artificial Sequence: Synthetic oligonucleotide
agccaaagcatgagaagcagc

SEQ ID NO: 39288 - DNA, 21 bp, Artificial Sequence
  Description of Artificial Sequence: Synthetic oligonucleotide
agccaaagcccagtcctcaaa

SEQ ID NO: 39289 - DNA, 21 bp, Artificial Sequence
  Description of Artificial Sequence: Synthetic oligonucleotide
agccaaagccaaatgctccca

SEQ ID NO: 39290 - DNA, 21 bp, Artificial Sequence
  Description of Artificial Sequence: Synthetic oligonucleotide
agccaaagcagattcagcgca

SEQ ID NO: 39291 - DNA, 21 bp, Artificial Sequence
  Description of Artificial Sequence: Synthetic oligonucleotide
agccaaagcagaatgcaacca

SEQ ID NO: 39292 - DNA, 21 bp, Artificial Sequence
  Description of Artificial Sequence: Synthetic oligonucleotide
agccaaagcagcatcagactc

SEQ ID NO: 39293 - DNA, 21 bp, Artificial Sequence
  Description of Artificial Sequence: Synthetic oligonucleotide
agccaaagcagcaactaccca

SEQ ID NO: 39294 - DNA, 21 bp, Artificial Sequence
  Description of Artificial Sequence: Synthetic oligonucleotide
agccaaagcacatacaacatc

SEQ ID NO: 39295 - DNA, 21 bp, Artificial Sequence
  Description of Artificial Sequence: Synthetic oligonucleotide
agccaaacaggactcctcaca

SEQ ID NO: 39296 - DNA, 21 bp, Artificial Sequence
  Description of Artificial Sequence: Synthetic oligonucleotide
agccaaacaatcccagacagc

SEQ ID NO: 39297 - DNA, 21 bp, Artificial Sequence
  Description of Artificial Sequence: Synthetic oligonucleotide
agccaaacaaaaagccaacac

SEQ ID NO: 39298 - DNA, 21 bp, Artificial Sequence
  Description of Artificial Sequence: Synthetic oligonucleotide
agccaaacaccaagaagcaca

SEQ ID NO: 39299 - DNA, 21 bp, Artificial Sequence
  Description of Artificial Sequence: Synthetic oligonucleotide
agccaaacacaacacagaatc

SEQ ID NO: 39300 - DNA, 21 bp, Artificial Sequence
  Description of Artificial Sequence: Synthetic oligonucleotide
agccaaacagtcggagtcagc

SEQ ID NO: 39301 - DNA, 21 bp, Artificial Sequence
  Description of Artificial Sequence: Synthetic oligonucleotide
agccaagtcggagcaccaaca

SEQ ID NO: 39302 - DNA, 21 bp, Artificial Sequence
  Description of Artificial Sequence: Synthetic oligonucleotide
agccaagtcggaatgtacaga

SEQ ID NO: 39303 - DNA, 21 bp, Artificial Sequence
  Description of Artificial Sequence: Synthetic oligonucleotide
agccaatgggtcccaacaaac

SEQ ID NO: 39304 - DNA, 21 bp, Artificial Sequence
  Description of Artificial Sequence: Synthetic oligonucleotide
agccaatacgcaagcctcgac

SEQ ID NO: 39305 - DNA, 21 bp, Artificial Sequence
  Description of Artificial Sequence: Synthetic oligonucleotide
agccaatacacaaaattccaa

SEQ ID NO: 39306 - DNA, 21 bp, Artificial Sequence
  Description of Artificial Sequence: Synthetic oligonucleotide
agccaatacgtcccaagcagc

SEQ ID NO: 39307 - DNA, 21 bp, Artificial Sequence
  Description of Artificial Sequence: Synthetic oligonucleotide
agcagagcagcaatggacgga

SEQ ID NO: 39308 - DNA, 21 bp, Artificial Sequence
  Description of Artificial Sequence: Synthetic oligonucleotide
agcagagcagacatcttcctc

SEQ ID NO: 39309 - DNA, 21 bp, Artificial Sequence
  Description of Artificial Sequence: Synthetic oligonucleotide
agcagagcaggaagaagcgaa

SEQ ID NO: 39310 - DNA, 21 bp, Artificial Sequence
  Description of Artificial Sequence: Synthetic oligonucleotide
agcagagcaggaacaacaaca

SEQ ID NO: 39311 - DNA, 21 bp, Artificial Sequence
  Description of Artificial Sequence: Synthetic oligonucleotide
agcagagcaatcctcgcagac

SEQ ID NO: 39312 - DNA, 21 bp, Artificial Sequence
  Description of Artificial Sequence: Synthetic oligonucleotide
agcagagcactcacaggacca

SEQ ID NO: 39313 - DNA, 21 bp, Artificial Sequence
  Description of Artificial Sequence: Synthetic oligonucleotide
agcagagcactcgtcagcgca

SEQ ID NO: 39314 - DNA, 21 bp, Artificial Sequence
  Description of Artificial Sequence: Synthetic oligonucleotide
agcagagcaaacctccacagc

SEQ ID NO: 39315 - DNA, 21 bp, Artificial Sequence
  Description of Artificial Sequence: Synthetic oligonucleotide
agcagagcaccaagcctccca

SEQ ID NO: 39316 - DNA, 21 bp, Artificial Sequence
  Description of Artificial Sequence: Synthetic oligonucleotide
agcagagcaagcatggcagtc

SEQ ID NO: 39317 - DNA, 21 bp, Artificial Sequence
  Description of Artificial Sequence: Synthetic oligonucleotide
agcagagcagtcagcgacgca

SEQ ID NO: 39318 - DNA, 21 bp, Artificial Sequence
  Description of Artificial Sequence: Synthetic oligonucleotide
agcagagacgcaatccacgac

SEQ ID NO: 39319 - DNA, 21 bp, Artificial Sequence
  Description of Artificial Sequence: Synthetic oligonucleotide
agcagagacgcaaaacaaagc

SEQ ID NO: 39320 - DNA, 21 bp, Artificial Sequence
  Description of Artificial Sequence: Synthetic oligonucleotide
agcagagacctcctcagccca

SEQ ID NO: 39321 - DNA, 21 bp, Artificial Sequence
  Description of Artificial Sequence: Synthetic oligonucleotide
agcagagacatgacaaacttc

SEQ ID NO: 39322 - DNA, 21 bp, Artificial Sequence
  Description of Artificial Sequence: Synthetic oligonucleotide
agcagagacaaccaaacagtc

SEQ ID NO: 39323 - DNA, 21 bp, Artificial Sequence
  Description of Artificial Sequence: Synthetic oligonucleotide
agcagagacagaacactcaac

SEQ ID NO: 39324 - DNA, 21 bp, Artificial Sequence
  Description of Artificial Sequence: Synthetic oligonucleotide
agcagagacagcggaacaagc

SEQ ID NO: 39325 - DNA, 21 bp, Artificial Sequence
  Description of Artificial Sequence: Synthetic oligonucleotide
agcagagacagccaaagagaa

SEQ ID NO: 39326 - DNA, 21 bp, Artificial Sequence
  Description of Artificial Sequence: Synthetic oligonucleotide
agcagagacacaggacacaca

SEQ ID NO: 39327 - DNA, 21 bp, Artificial Sequence
  Description of Artificial Sequence: Synthetic oligonucleotide
agcagagacacaagccaccac

SEQ ID NO: 39328 - DNA, 21 bp, Artificial Sequence
  Description of Artificial Sequence: Synthetic oligonucleotide
agcagagacgtcccacaaaac

SEQ ID NO: 39329 - DNA, 21 bp, Artificial Sequence
  Description of Artificial Sequence: Synthetic oligonucleotide
agcagagactaccaactcaac

SEQ ID NO: 39330 - DNA, 21 bp, Artificial Sequence
  Description of Artificial Sequence: Synthetic oligonucleotide
agcagagaaaaagtcagcgca

SEQ ID NO: 39331 - DNA, 21 bp, Artificial Sequence
  Description of Artificial Sequence: Synthetic oligonucleotide
agcagagaactcagcagactc

SEQ ID NO: 39332 - DNA, 21 bp, Artificial Sequence
  Description of Artificial Sequence: Synthetic oligonucleotide
agcagagaaatggcaccaagc

SEQ ID NO: 39333 - DNA, 21 bp, Artificial Sequence
  Description of Artificial Sequence: Synthetic oligonucleotide
agcagagaaccagcaaacatc

SEQ ID NO: 39334 - DNA, 21 bp, Artificial Sequence
  Description of Artificial Sequence: Synthetic oligonucleotide
agcagagaacaactcagcgga

SEQ ID NO: 39335 - DNA, 21 bp, Artificial Sequence
  Description of Artificial Sequence: Synthetic oligonucleotide
agcagagaaagcagattcgac

SEQ ID NO: 39336 - DNA, 21 bp, Artificial Sequence
  Description of Artificial Sequence: Synthetic oligonucleotide
agcagagaaagctaccaacaa

SEQ ID NO: 39337 - DNA, 21 bp, Artificial Sequence
  Description of Artificial Sequence: Synthetic oligonucleotide
agcagagaaacaagagcagtc

SEQ ID NO: 39338 - DNA, 21 bp, Artificial Sequence
  Description of Artificial Sequence: Synthetic oligonucleotide
agcagagaagtcgacaaaaca

SEQ ID NO: 39339 - DNA, 21 bp, Artificial Sequence
  Description of Artificial Sequence: Synthetic oligonucleotide
agcagagaagtcgtcgcaagc

SEQ ID NO: 39340 - DNA, 21 bp, Artificial Sequence
  Description of Artificial Sequence: Synthetic oligonucleotide
agcagattcgaagcaaacaca

SEQ ID NO: 39341 - DNA, 21 bp, Artificial Sequence
  Description of Artificial Sequence: Synthetic oligonucleotide
agcagattcgaacaactcgga

SEQ ID NO: 39342 - DNA, 21 bp, Artificial Sequence
  Description of Artificial Sequence: Synthetic oligonucleotide
agcagattccacccaacagaa

SEQ ID NO: 39343 - DNA, 21 bp, Artificial Sequence
  Description of Artificial Sequence: Synthetic oligonucleotide
agcagattccaaggaagcgga

SEQ ID NO: 39344 - DNA, 21 bp, Artificial Sequence
  Description of Artificial Sequence: Synthetic oligonucleotide
agcagattcacaacacaagtc

SEQ ID NO: 39345 - DNA, 21 bp, Artificial Sequence
  Description of Artificial Sequence: Synthetic oligonucleotide
agcagaggagacccactcttc

SEQ ID NO: 39346 - DNA, 21 bp, Artificial Sequence
  Description of Artificial Sequence: Synthetic oligonucleotide
agcagaggagacagaccaatg

SEQ ID NO: 39347 - DNA, 21 bp, Artificial Sequence
  Description of Artificial Sequence: Synthetic oligonucleotide
agcagaggagacacaatggtc

SEQ ID NO: 39348 - DNA, 21 bp, Artificial Sequence
  Description of Artificial Sequence: Synthetic oligonucleotide
agcagaggagaacactacgtc

SEQ ID NO: 39349 - DNA, 21 bp, Artificial Sequence
  Description of Artificial Sequence: Synthetic oligonucleotide
agcagaggacacgaaacaagc

SEQ ID NO: 39350 - DNA, 21 bp, Artificial Sequence
  Description of Artificial Sequence: Synthetic oligonucleotide
agcagaggaaaagaagtcatc

SEQ ID NO: 39351 - DNA, 21 bp, Artificial Sequence
  Description of Artificial Sequence: Synthetic oligonucleotide
agcagaggaagcgaaagcatc

SEQ ID NO: 39352 - DNA, 21 bp, Artificial Sequence
  Description of Artificial Sequence: Synthetic oligonucleotide
agcagaggagtcgacaacctc

SEQ ID NO: 39353 - DNA, 21 bp, Artificial Sequence
  Description of Artificial Sequence: Synthetic oligonucleotide
agcagaggagtcagcagccca

SEQ ID NO: 39354 - DNA, 21 bp, Artificial Sequence
  Description of Artificial Sequence: Synthetic oligonucleotide
agcagacacccagtcccacac

SEQ ID NO: 39355 - DNA, 21 bp, Artificial Sequence
  Description of Artificial Sequence: Synthetic oligonucleotide
agcagacaccaagcaacaagc

SEQ ID NO: 39356 - DNA, 21 bp, Artificial Sequence
  Description of Artificial Sequence: Synthetic oligonucleotide
agcagacacacaagcctcagc

SEQ ID NO: 39357 - DNA, 21 bp, Artificial Sequence
  Description of Artificial Sequence: Synthetic oligonucleotide
agcagacactacacaacagaa

SEQ ID NO: 39358 - DNA, 21 bp, Artificial Sequence
  Description of Artificial Sequence: Synthetic oligonucleotide
agcagaatcgcagaaccaaaa

SEQ ID NO: 39359 - DNA, 21 bp, Artificial Sequence
  Description of Artificial Sequence: Synthetic oligonucleotide
agcagaatcggaatcagcgca

SEQ ID NO: 39360 - DNA, 21 bp, Artificial Sequence
  Description of Artificial Sequence: Synthetic oligonucleotide
agcagaatcctcagactcgac

SEQ ID NO: 39361 - DNA, 21 bp, Artificial Sequence
  Description of Artificial Sequence: Synthetic oligonucleotide
agcagactcggaggacacagc

SEQ ID NO: 39362 - DNA, 21 bp, Artificial Sequence
  Description of Artificial Sequence: Synthetic oligonucleotide
agcagactcccaacacaagac

SEQ ID NO: 39363 - DNA, 21 bp, Artificial Sequence
  Description of Artificial Sequence: Synthetic oligonucleotide
agcagactcccatacccaaac

SEQ ID NO: 39364 - DNA, 21 bp, Artificial Sequence
  Description of Artificial Sequence: Synthetic oligonucleotide
agcagactcagcggagcagaa

SEQ ID NO: 39365 - DNA, 21 bp, Artificial Sequence
  Description of Artificial Sequence: Synthetic oligonucleotide
agcagactcagccacgaactc

SEQ ID NO: 39366 - DNA, 21 bp, Artificial Sequence
  Description of Artificial Sequence: Synthetic oligonucleotide
agcagactcacaccaccaagc

SEQ ID NO: 39367 - DNA, 21 bp, Artificial Sequence
  Description of Artificial Sequence: Synthetic oligonucleotide
agcagactcacaccataccca

SEQ ID NO: 39368 - DNA, 21 bp, Artificial Sequence
  Description of Artificial Sequence: Synthetic oligonucleotide
agcagactcgtcccagtcgca

SEQ ID NO: 39369 - DNA, 21 bp, Artificial Sequence
  Description of Artificial Sequence: Synthetic oligonucleotide
agcagaatggcaatcagcgac

SEQ ID NO: 39370 - DNA, 21 bp, Artificial Sequence
  Description of Artificial Sequence: Synthetic oligonucleotide
agcagaatgggacaaacaagc

SEQ ID NO: 39371 - DNA, 21 bp, Artificial Sequence
  Description of Artificial Sequence: Synthetic oligonucleotide
agcagaatgagcttcgcacca

SEQ ID NO: 39372 - DNA, 21 bp, Artificial Sequence
  Description of Artificial Sequence: Synthetic oligonucleotide
agcagaatgagccaaggattc

SEQ ID NO: 39373 - DNA, 21 bp, Artificial Sequence
  Description of Artificial Sequence: Synthetic oligonucleotide
agcagaaacagcctcgcactc

SEQ ID NO: 39374 - DNA, 21 bp, Artificial Sequence
  Description of Artificial Sequence: Synthetic oligonucleotide
agcagaaacagcctcctcgac

SEQ ID NO: 39375 - DNA, 21 bp, Artificial Sequence
  Description of Artificial Sequence: Synthetic oligonucleotide
agcagaaacacaaacacagac

SEQ ID NO: 39376 - DNA, 21 bp, Artificial Sequence
  Description of Artificial Sequence: Synthetic oligonucleotide
agcagaaacacaccagtcgac

SEQ ID NO: 39377 - DNA, 21 bp, Artificial Sequence
  Description of Artificial Sequence: Synthetic oligonucleotide
agcagaccagcaatcggaagc

SEQ ID NO: 39378 - DNA, 21 bp, Artificial Sequence
  Description of Artificial Sequence: Synthetic oligonucleotide
agcagaccagcaccagtcctc

SEQ ID NO: 39379 - DNA, 21 bp, Artificial Sequence
  Description of Artificial Sequence: Synthetic oligonucleotide
agcagaccagcaacaaaccca

SEQ ID NO: 39380 - DNA, 21 bp, Artificial Sequence
  Description of Artificial Sequence: Synthetic oligonucleotide
agcagaccagaaccaccatac

SEQ ID NO: 39381 - DNA, 21 bp, Artificial Sequence
  Description of Artificial Sequence: Synthetic oligonucleotide
agcagaccaggattccaaaac

SEQ ID NO: 39382 - DNA, 21 bp, Artificial Sequence
  Description of Artificial Sequence: Synthetic oligonucleotide
agcagaccaggactcacattc

SEQ ID NO: 39383 - DNA, 21 bp, Artificial Sequence
  Description of Artificial Sequence: Synthetic oligonucleotide
agcagaccaatcacaccactc

SEQ ID NO: 39384 - DNA, 21 bp, Artificial Sequence
  Description of Artificial Sequence: Synthetic oligonucleotide
agcagaccaatgagcctcgaa

SEQ ID NO: 39385 - DNA, 21 bp, Artificial Sequence
  Description of Artificial Sequence: Synthetic oligonucleotide
agcagaccaagagacacagac

SEQ ID NO: 39386 - DNA, 21 bp, Artificial Sequence
  Description of Artificial Sequence: Synthetic oligonucleotide
agcagaccaagcgcataccaa

SEQ ID NO: 39387 - DNA, 21 bp, Artificial Sequence
  Description of Artificial Sequence: Synthetic oligonucleotide
agcagaccaagcgacgtctgg

SEQ ID NO: 39388 - DNA, 21 bp, Artificial Sequence
  Description of Artificial Sequence: Synthetic oligonucleotide
agcagaccaagcaacgacgca

SEQ ID NO: 39389 - DNA, 21 bp, Artificial Sequence
  Description of Artificial Sequence: Synthetic oligonucleotide
agcagaccaagcagcgaaagc

SEQ ID NO: 39390 - DNA, 21 bp, Artificial Sequence
  Description of Artificial Sequence: Synthetic oligonucleotide
agcagaccaacagcacaagaa

SEQ ID NO: 39391 - DNA, 21 bp, Artificial Sequence
  Description of Artificial Sequence: Synthetic oligonucleotide
agcagaccaacaagcgcaagc

SEQ ID NO: 39392 - DNA, 21 bp, Artificial Sequence
  Description of Artificial Sequence: Synthetic oligonucleotide
agcagaccagtcgtcagcagc

SEQ ID NO: 39393 - DNA, 21 bp, Artificial Sequence
  Description of Artificial Sequence: Synthetic oligonucleotide
agcagacaagcactcagcgac

SEQ ID NO: 39394 - DNA, 21 bp, Artificial Sequence
  Description of Artificial Sequence: Synthetic oligonucleotide
agcagacaagaccactggcca

SEQ ID NO: 39395 - DNA, 21 bp, Artificial Sequence
  Description of Artificial Sequence: Synthetic oligonucleotide
agcagacaagacccagtcatc

SEQ ID NO: 39396 - DNA, 21 bp, Artificial Sequence
  Description of Artificial Sequence: Synthetic oligonucleotide
agcagacaactcgcaccaagc

SEQ ID NO: 39397 - DNA, 21 bp, Artificial Sequence
  Description of Artificial Sequence: Synthetic oligonucleotide
agcagacaaatggaacacgtc

SEQ ID NO: 39398 - DNA, 21 bp, Artificial Sequence
  Description of Artificial Sequence: Synthetic oligonucleotide
agcagacaacaagaaagagga

SEQ ID NO: 39399 - DNA, 21 bp, Artificial Sequence
  Description of Artificial Sequence: Synthetic oligonucleotide
agcagacaacaaacaccagac

SEQ ID NO: 39400 - DNA, 21 bp, Artificial Sequence
  Description of Artificial Sequence: Synthetic oligonucleotide
agcagacaaagcccaagcctc

SEQ ID NO: 39401 - DNA, 21 bp, Artificial Sequence
  Description of Artificial Sequence: Synthetic oligonucleotide
agcagacaaagcgtccacgga

SEQ ID NO: 39402 - DNA, 21 bp, Artificial Sequence
  Description of Artificial Sequence: Synthetic oligonucleotide
agcagaagaccaagcgacatc

SEQ ID NO: 39403 - DNA, 21 bp, Artificial Sequence
  Description of Artificial Sequence: Synthetic oligonucleotide
agcagaagcgcactcacagac

SEQ ID NO: 39404 - DNA, 21 bp, Artificial Sequence
  Description of Artificial Sequence: Synthetic oligonucleotide
agcagaagcgaaagaatgcca

SEQ ID NO: 39405 - DNA, 21 bp, Artificial Sequence
  Description of Artificial Sequence: Synthetic oligonucleotide
agcagaagcggacaaggagac

SEQ ID NO: 39406 - DNA, 21 bp, Artificial Sequence
  Description of Artificial Sequence: Synthetic oligonucleotide
agcagaagcggaagcctccca

SEQ ID NO: 39407 - DNA, 21 bp, Artificial Sequence
  Description of Artificial Sequence: Synthetic oligonucleotide
agcagaagcggaacaccattc

SEQ ID NO: 39408 - DNA, 21 bp, Artificial Sequence
  Description of Artificial Sequence: Synthetic oligonucleotide
agcagaagccacccaagccaa

SEQ ID NO: 39409 - DNA, 21 bp, Artificial Sequence
  Description of Artificial Sequence: Synthetic oligonucleotide
agcagaagcatcatgcaagga

SEQ ID NO: 39410 - DNA, 21 bp, Artificial Sequence
  Description of Artificial Sequence: Synthetic oligonucleotide
agcagaagcatcagcacagac

SEQ ID NO: 39411 - DNA, 21 bp, Artificial Sequence
  Description of Artificial Sequence: Synthetic oligonucleotide
agcagaagcctcgaaagcaca

SEQ ID NO: 39412 - DNA, 21 bp, Artificial Sequence
  Description of Artificial Sequence: Synthetic oligonucleotide
agcagaagcctcggaacaaac

SEQ ID NO: 39413 - DNA, 21 bp, Artificial Sequence
  Description of Artificial Sequence: Synthetic oligonucleotide
agcagaagcctccacctcgtc

SEQ ID NO: 39414 - DNA, 21 bp, Artificial Sequence
  Description of Artificial Sequence: Synthetic oligonucleotide
agcagaagcctcagaccagac

SEQ ID NO: 39415 - DNA, 21 bp, Artificial Sequence
  Description of Artificial Sequence: Synthetic oligonucleotide
agcagaagcaacgcaaacatc

SEQ ID NO: 39416 - DNA, 21 bp, Artificial Sequence
  Description of Artificial Sequence: Synthetic oligonucleotide
agcagaagcaacggagtcatc

SEQ ID NO: 39417 - DNA, 21 bp, Artificial Sequence
  Description of Artificial Sequence: Synthetic oligonucleotide
agcagaagcccaggagtccac

SEQ ID NO: 39418 - DNA, 21 bp, Artificial Sequence
  Description of Artificial Sequence: Synthetic oligonucleotide
agcagaagcccaatgcaacca

SEQ ID NO: 39419 - DNA, 21 bp, Artificial Sequence
  Description of Artificial Sequence: Synthetic oligonucleotide
agcagaagcccaccactccca

SEQ ID NO: 39420 - DNA, 21 bp, Artificial Sequence
  Description of Artificial Sequence: Synthetic oligonucleotide
agcagaagcccaccaatgaca

SEQ ID NO: 39421 - DNA, 21 bp, Artificial Sequence
  Description of Artificial Sequence: Synthetic oligonucleotide
agcagaagcagaacagaaaca

SEQ ID NO: 39422 - DNA, 21 bp, Artificial Sequence
  Description of Artificial Sequence: Synthetic oligonucleotide
agcagaagcagcggaggaaac

SEQ ID NO: 39423 - DNA, 21 bp, Artificial Sequence
  Description of Artificial Sequence: Synthetic oligonucleotide
agcagaagcagcggaggaagc

SEQ ID NO: 39424 - DNA, 21 bp, Artificial Sequence
  Description of Artificial Sequence: Synthetic oligonucleotide
agcagaagcgtcagcggaaca

SEQ ID NO: 39425 - DNA, 21 bp, Artificial Sequence
  Description of Artificial Sequence: Synthetic oligonucleotide
agcagaagcgtcagcctcagc

SEQ ID NO: 39426 - DNA, 21 bp, Artificial Sequence
  Description of Artificial Sequence: Synthetic oligonucleotide
agcagaacagcaaacgcagca

SEQ ID NO: 39427 - DNA, 21 bp, Artificial Sequence
  Description of Artificial Sequence: Synthetic oligonucleotide
agcagaacagcaagcttccca

SEQ ID NO: 39428 - DNA, 21 bp, Artificial Sequence
  Description of Artificial Sequence: Synthetic oligonucleotide
agcagaacagcaagcagcgga

SEQ ID NO: 39429 - DNA, 21 bp, Artificial Sequence
  Description of Artificial Sequence: Synthetic oligonucleotide
agcagaacagacacaatcaaa

SEQ ID NO: 39430 - DNA, 21 bp, Artificial Sequence
  Description of Artificial Sequence: Synthetic oligonucleotide
agcagaacagaagcactcgga

SEQ ID NO: 39431 - DNA, 21 bp, Artificial Sequence
  Description of Artificial Sequence: Synthetic oligonucleotide
agcagaacagaaagaagcgca

SEQ ID NO: 39432 - DNA, 21 bp, Artificial Sequence
  Description of Artificial Sequence: Synthetic oligonucleotide
agcagaacaggagcataccca

SEQ ID NO: 39433 - DNA, 21 bp, Artificial Sequence
  Description of Artificial Sequence: Synthetic oligonucleotide
agcagaacaggaagcacactc

SEQ ID NO: 39434 - DNA, 21 bp, Artificial Sequence
  Description of Artificial Sequence: Synthetic oligonucleotide
agcagaacacacgaccaagca

SEQ ID NO: 39435 - DNA, 21 bp, Artificial Sequence
  Description of Artificial Sequence: Synthetic oligonucleotide
agcagaacactcgtcggagaa

SEQ ID NO: 39436 - DNA, 21 bp, Artificial Sequence
  Description of Artificial Sequence: Synthetic oligonucleotide
agcagaacaccacacatcgac

SEQ ID NO: 39437 - DNA, 21 bp, Artificial Sequence
  Description of Artificial Sequence: Synthetic oligonucleotide
agcagaacaccaatgagcatg

SEQ ID NO: 39438 - DNA, 21 bp, Artificial Sequence
  Description of Artificial Sequence: Synthetic oligonucleotide
agcagaacaagcatgccaagc

SEQ ID NO: 39439 - DNA, 21 bp, Artificial Sequence
  Description of Artificial Sequence: Synthetic oligonucleotide
agcagaacaagcagactcgac

SEQ ID NO: 39440 - DNA, 21 bp, Artificial Sequence
  Description of Artificial Sequence: Synthetic oligonucleotide
agcagaacagtcgcaagcgga

SEQ ID NO: 39441 - DNA, 21 bp, Artificial Sequence
  Description of Artificial Sequence: Synthetic oligonucleotide
agcagaacagtccaagcaatg

SEQ ID NO: 39442 - DNA, 21 bp, Artificial Sequence
  Description of Artificial Sequence: Synthetic oligonucleotide
agcagagtcgcaacaacactc

SEQ ID NO: 39443 - DNA, 21 bp, Artificial Sequence
  Description of Artificial Sequence: Synthetic oligonucleotide
agcagagtcatccacgtcagc

SEQ ID NO: 39444 - DNA, 21 bp, Artificial Sequence
  Description of Artificial Sequence: Synthetic oligonucleotide
agcagagtcaacgcaccaagc

SEQ ID NO: 39445 - DNA, 21 bp, Artificial Sequence
  Description of Artificial Sequence: Synthetic oligonucleotide
agcagagtcaacgcacaagca

SEQ ID NO: 39446 - DNA, 21 bp, Artificial Sequence
  Description of Artificial Sequence: Synthetic oligonucleotide
agcagagtcccacacagcgac

SEQ ID NO: 39447 - DNA, 21 bp, Artificial Sequence
  Description of Artificial Sequence: Synthetic oligonucleotide
agcagagtcccaaacctcagc

SEQ ID NO: 39448 - DNA, 21 bp, Artificial Sequence
  Description of Artificial Sequence: Synthetic oligonucleotide
agcagagtccaaaacggagtc

SEQ ID NO: 39449 - DNA, 21 bp, Artificial Sequence
  Description of Artificial Sequence: Synthetic oligonucleotide
agcagagtcagcgcagtcatg

SEQ ID NO: 39450 - DNA, 21 bp, Artificial Sequence
  Description of Artificial Sequence: Synthetic oligonucleotide
agcagagtcagcggacaaagc

SEQ ID NO: 39451 - DNA, 21 bp, Artificial Sequence
  Description of Artificial Sequence: Synthetic oligonucleotide
agcagagtcagccaagtcatg

SEQ ID NO: 39452 - DNA, 21 bp, Artificial Sequence
  Description of Artificial Sequence: Synthetic oligonucleotide
agcagatgggtcacaatcgaa

SEQ ID NO: 39453 - DNA, 21 bp, Artificial Sequence
  Description of Artificial Sequence: Synthetic oligonucleotide
agcagatacgcaacaagcgga

SEQ ID NO: 39454 - DNA, 21 bp, Artificial Sequence
  Description of Artificial Sequence: Synthetic oligonucleotide
agcagatacgaagacccagaa

SEQ ID NO: 39455 - DNA, 21 bp, Artificial Sequence
  Description of Artificial Sequence: Synthetic oligonucleotide
agcagatacggaagcgacagc

SEQ ID NO: 39456 - DNA, 21 bp, Artificial Sequence
  Description of Artificial Sequence: Synthetic oligonucleotide
agcagatacaacggaatggga

SEQ ID NO: 39457 - DNA, 21 bp, Artificial Sequence
  Description of Artificial Sequence: Synthetic oligonucleotide
agcagatacccagaagcaaca

SEQ ID NO: 39458 - DNA, 21 bp, Artificial Sequence
  Description of Artificial Sequence: Synthetic oligonucleotide
agcagcgcatgcatcaaagca

SEQ ID NO: 39459 - DNA, 21 bp, Artificial Sequence
  Description of Artificial Sequence: Synthetic oligonucleotide
agcagcgcagaagcaagactc

SEQ ID NO: 39460 - DNA, 21 bp, Artificial Sequence
  Description of Artificial Sequence: Synthetic oligonucleotide
agcagcgcaggagcaccactc

SEQ ID NO: 39461 - DNA, 21 bp, Artificial Sequence
  Description of Artificial Sequence: Synthetic oligonucleotide
agcagcgcaggatgggtcgga

SEQ ID NO: 39462 - DNA, 21 bp, Artificial Sequence
  Description of Artificial Sequence: Synthetic oligonucleotide
agcagcgcaatcccaatgaaa

SEQ ID NO: 39463 - DNA, 21 bp, Artificial Sequence
  Description of Artificial Sequence: Synthetic oligonucleotide
agcagcgcaaacgcaccaaga

SEQ ID NO: 39464 - DNA, 21 bp, Artificial Sequence
  Description of Artificial Sequence: Synthetic oligonucleotide
agcagcgcaaacgcaagcaca

SEQ ID NO: 39465 - DNA, 21 bp, Artificial Sequence
  Description of Artificial Sequence: Synthetic oligonucleotide
agcagcgcaccagtcagccca

SEQ ID NO: 39466 - DNA, 21 bp, Artificial Sequence
  Description of Artificial Sequence: Synthetic oligonucleotide
agcagcgcacaagtcagcgtc

SEQ ID NO: 39467 - DNA, 21 bp, Artificial Sequence
  Description of Artificial Sequence: Synthetic oligonucleotide
agcagcgcaacaatgacaaca

SEQ ID NO: 39468 - DNA, 21 bp, Artificial Sequence
  Description of Artificial Sequence: Synthetic oligonucleotide
agcagcgacgcaagcagaaga

SEQ ID NO: 39469 - DNA, 21 bp, Artificial Sequence
  Description of Artificial Sequence: Synthetic oligonucleotide
agcagcgaccacggactcaaa

SEQ ID NO: 39470 - DNA, 21 bp, Artificial Sequence
  Description of Artificial Sequence: Synthetic oligonucleotide
agcagcgaccacatcggatgc

SEQ ID NO: 39471 - DNA, 21 bp, Artificial Sequence
  Description of Artificial Sequence: Synthetic oligonucleotide
agcagcgacatcagaccaagc

SEQ ID NO: 39472 - DNA, 21 bp, Artificial Sequence
  Description of Artificial Sequence: Synthetic oligonucleotide
agcagcgacagcgtcaaacac

SEQ ID NO: 39473 - DNA, 21 bp, Artificial Sequence
  Description of Artificial Sequence: Synthetic oligonucleotide
agcagcgacacaagcccagga

SEQ ID NO: 39474 - DNA, 21 bp, Artificial Sequence
  Description of Artificial Sequence: Synthetic oligonucleotide
agcagcgacacagtcacagaa

SEQ ID NO: 39475 - DNA, 21 bp, Artificial Sequence
  Description of Artificial Sequence: Synthetic oligonucleotide
agcagcgaagcagcaagagga

SEQ ID NO: 39476 - DNA, 21 bp, Artificial Sequence
  Description of Artificial Sequence: Synthetic oligonucleotide
agcagcgaagacgtcggattc

SEQ ID NO: 39477 - DNA, 21 bp, Artificial Sequence
  Description of Artificial Sequence: Synthetic oligonucleotide
agcagcgaacacggaagaaac

SEQ ID NO: 39478 - DNA, 21 bp, Artificial Sequence
  Description of Artificial Sequence: Synthetic oligonucleotide
agcagcgaaaaacacagccca

SEQ ID NO: 39479 - DNA, 21 bp, Artificial Sequence
  Description of Artificial Sequence: Synthetic oligonucleotide
agcagcgaaaaaagaccagga

SEQ ID NO: 39480 - DNA, 21 bp, Artificial Sequence
  Description of Artificial Sequence: Synthetic oligonucleotide
agcagcgaaatgagcggaaac

SEQ ID NO: 39481 - DNA, 21 bp, Artificial Sequence
  Description of Artificial Sequence: Synthetic oligonucleotide
agcagcgaaagagcacacgga

SEQ ID NO: 39482 - DNA, 21 bp, Artificial Sequence
  Description of Artificial Sequence: Synthetic oligonucleotide
agcagcgaaagagcaagcagc

SEQ ID NO: 39483 - DNA, 21 bp, Artificial Sequence
  Description of Artificial Sequence: Synthetic oligonucleotide
agcagcgaaagcctcggaaga

SEQ ID NO: 39484 - DNA, 21 bp, Artificial Sequence
  Description of Artificial Sequence: Synthetic oligonucleotide
agcagcgaaagcagatggatc

SEQ ID NO: 39485 - DNA, 21 bp, Artificial Sequence
  Description of Artificial Sequence: Synthetic oligonucleotide
agcagcttcgcagtcggagga

SEQ ID NO: 39486 - DNA, 21 bp, Artificial Sequence
  Description of Artificial Sequence: Synthetic oligonucleotide
agcagcttcgacagaggagca

SEQ ID NO: 39487 - DNA, 21 bp, Artificial Sequence
  Description of Artificial Sequence: Synthetic oligonucleotide
agcagcttcaaaggaacattc

SEQ ID NO: 39488 - DNA, 21 bp, Artificial Sequence
  Description of Artificial Sequence: Synthetic oligonucleotide
agcagcttcctcacaccaagc

SEQ ID NO: 39489 - DNA, 21 bp, Artificial Sequence
  Description of Artificial Sequence: Synthetic oligonucleotide
agcagcttcccaagcaaagca

SEQ ID NO: 39490 - DNA, 21 bp, Artificial Sequence
  Description of Artificial Sequence: Synthetic oligonucleotide
agcagcttcagaacaccactc

SEQ ID NO: 39491 - DNA, 21 bp, Artificial Sequence
  Description of Artificial Sequence: Synthetic oligonucleotide
agcagcggagcaagcagccca

SEQ ID NO: 39492 - DNA, 21 bp, Artificial Sequence
  Description of Artificial Sequence: Synthetic oligonucleotide
agcagcggagacagaagccac

SEQ ID NO: 39493 - DNA, 21 bp, Artificial Sequence
  Description of Artificial Sequence: Synthetic oligonucleotide
agcagcggagaaggatacaaa

SEQ ID NO: 39494 - DNA, 21 bp, Artificial Sequence
  Description of Artificial Sequence: Synthetic oligonucleotide
agcagcggattcggaaaacca

SEQ ID NO: 39495 - DNA, 21 bp, Artificial Sequence
  Description of Artificial Sequence: Synthetic oligonucleotide
agcagcggaatcggacacttc

SEQ ID NO: 39496 - DNA, 21 bp, Artificial Sequence
  Description of Artificial Sequence: Synthetic oligonucleotide
agcagcggactcgcaagagca

SEQ ID NO: 39497 - DNA, 21 bp, Artificial Sequence
  Description of Artificial Sequence: Synthetic oligonucleotide
agcagcggactcatcagcgtc

SEQ ID NO: 39498 - DNA, 21 bp, Artificial Sequence
  Description of Artificial Sequence: Synthetic oligonucleotide
agcagcggaaacaacctccac

SEQ ID NO: 39499 - DNA, 21 bp, Artificial Sequence
  Description of Artificial Sequence: Synthetic oligonucleotide
agcagcggaccaagcctcgca

SEQ ID NO: 39500 - DNA, 21 bp, Artificial Sequence
  Description of Artificial Sequence: Synthetic oligonucleotide
agcagcggacaagtcagacaa

SEQ ID NO: 39501 - DNA, 21 bp, Artificial Sequence
  Description of Artificial Sequence: Synthetic oligonucleotide
agcagcggaagaccagtcgca

SEQ ID NO: 39502 - DNA, 21 bp, Artificial Sequence
  Description of Artificial Sequence: Synthetic oligonucleotide
agcagcggaacaatgagctac

SEQ ID NO: 39503 - DNA, 21 bp, Artificial Sequence
  Description of Artificial Sequence: Synthetic oligonucleotide
agcagccacttcagagcagac

SEQ ID NO: 39504 - DNA, 21 bp, Artificial Sequence
  Description of Artificial Sequence: Synthetic oligonucleotide
agcagccacttcgtcgtcaca

SEQ ID NO: 39505 - DNA, 21 bp, Artificial Sequence
  Description of Artificial Sequence: Synthetic oligonucleotide
agcagccaccaccaattccca

SEQ ID NO: 39506 - DNA, 21 bp, Artificial Sequence
  Description of Artificial Sequence: Synthetic oligonucleotide
agcagccacaaagtcgcatgg

SEQ ID NO: 39507 - DNA, 21 bp, Artificial Sequence
  Description of Artificial Sequence: Synthetic oligonucleotide
agcagccacatgagcccatgg

SEQ ID NO: 39508 - DNA, 21 bp, Artificial Sequence
  Description of Artificial Sequence: Synthetic oligonucleotide
agcagccacccaagcagaatc

SEQ ID NO: 39509 - DNA, 21 bp, Artificial Sequence
  Description of Artificial Sequence: Synthetic oligonucleotide
agcagccaccaagaaaaactc

SEQ ID NO: 39510 - DNA, 21 bp, Artificial Sequence
  Description of Artificial Sequence: Synthetic oligonucleotide
agcagccacagagcactcgtc

SEQ ID NO: 39511 - DNA, 21 bp, Artificial Sequence
  Description of Artificial Sequence: Synthetic oligonucleotide
agcagccacagcctctacaca

SEQ ID NO: 39512 - DNA, 21 bp, Artificial Sequence
  Description of Artificial Sequence: Synthetic oligonucleotide
agcagccacagctacgtcaca

SEQ ID NO: 39513 - DNA, 21 bp, Artificial Sequence
  Description of Artificial Sequence: Synthetic oligonucleotide
agcagccacgtcacaggatac

SEQ ID NO: 39514 - DNA, 21 bp, Artificial Sequence
  Description of Artificial Sequence: Synthetic oligonucleotide
agcagcatccacaacgcagtc

SEQ ID NO: 39515 - DNA, 21 bp, Artificial Sequence
  Description of Artificial Sequence: Synthetic oligonucleotide
agcagcatcatcctcggagac

SEQ ID NO: 39516 - DNA, 21 bp, Artificial Sequence
  Description of Artificial Sequence: Synthetic oligonucleotide
agcagcatcccaagacaccca

SEQ ID NO: 39517 - DNA, 21 bp, Artificial Sequence
  Description of Artificial Sequence: Synthetic oligonucleotide
agcagcatcccaagcaacgtc

SEQ ID NO: 39518 - DNA, 21 bp, Artificial Sequence
  Description of Artificial Sequence: Synthetic oligonucleotide
agcagcatccaaacagcacaa

SEQ ID NO: 39519 - DNA, 21 bp, Artificial Sequence
  Description of Artificial Sequence: Synthetic oligonucleotide
agcagcatcagaccaagccca

SEQ ID NO: 39520 - DNA, 21 bp, Artificial Sequence
  Description of Artificial Sequence: Synthetic oligonucleotide
agcagcatcagcggaagcagc

SEQ ID NO: 39521 - DNA, 21 bp, Artificial Sequence
  Description of Artificial Sequence: Synthetic oligonucleotide
agcagcatcagcccaaacgga

SEQ ID NO: 39522 - DNA, 21 bp, Artificial Sequence
  Description of Artificial Sequence: Synthetic oligonucleotide
agcagcaaagaaagcccactc

SEQ ID NO: 39523 - DNA, 21 bp, Artificial Sequence
  Description of Artificial Sequence: Synthetic oligonucleotide
agcagcaaaggataccacctc

SEQ ID NO: 39524 - DNA, 21 bp, Artificial Sequence
  Description of Artificial Sequence: Synthetic oligonucleotide
agcagcaaaggatacctcgtc

SEQ ID NO: 39525 - DNA, 21 bp, Artificial Sequence
  Description of Artificial Sequence: Synthetic oligonucleotide
agcagcaaactcgaaacagaa

SEQ ID NO: 39526 - DNA, 21 bp, Artificial Sequence
  Description of Artificial Sequence: Synthetic oligonucleotide
agcagcaaaatgacaggaagc

SEQ ID NO: 39527 - DNA, 21 bp, Artificial Sequence
  Description of Artificial Sequence: Synthetic oligonucleotide
agcagcaaacaagtcacaaac

SEQ ID NO: 39528 - DNA, 21 bp, Artificial Sequence
  Description of Artificial Sequence: Synthetic oligonucleotide
agcagcaaatacgcagaaaac

SEQ ID NO: 39529 - DNA, 21 bp, Artificial Sequence
  Description of Artificial Sequence: Synthetic oligonucleotide
agcagcctcgcaagcggagca

SEQ ID NO: 39530 - DNA, 21 bp, Artificial Sequence
  Description of Artificial Sequence: Synthetic oligonucleotide
agcagcctcgacagagaattc

SEQ ID NO: 39531 - DNA, 21 bp, Artificial Sequence
  Description of Artificial Sequence: Synthetic oligonucleotide
agcagcctcggagaaacactc

SEQ ID NO: 39532 - DNA, 21 bp, Artificial Sequence
  Description of Artificial Sequence: Synthetic oligonucleotide
agcagcctcatcgaactcctc

SEQ ID NO: 39533 - DNA, 21 bp, Artificial Sequence
  Description of Artificial Sequence: Synthetic oligonucleotide
agcagcctcaaaatcgaaaca

SEQ ID NO: 39534 - DNA, 21 bp, Artificial Sequence
  Description of Artificial Sequence: Synthetic oligonucleotide
agcagcctcaaactcaacgga

SEQ ID NO: 39535 - DNA, 21 bp, Artificial Sequence
  Description of Artificial Sequence: Synthetic oligonucleotide
agcagcctcaacacaggagca

SEQ ID NO: 39536 - DNA, 21 bp, Artificial Sequence
  Description of Artificial Sequence: Synthetic oligonucleotide
agcagcctcccagcaggaaga

SEQ ID NO: 39537 - DNA, 21 bp, Artificial Sequence
  Description of Artificial Sequence: Synthetic oligonucleotide
agcagcctcagaaacaacatc

SEQ ID NO: 39538 - DNA, 21 bp, Artificial Sequence
  Description of Artificial Sequence: Synthetic oligonucleotide
agcagcctcagaccagcaaca

SEQ ID NO: 39539 - DNA, 21 bp, Artificial Sequence
  Description of Artificial Sequence: Synthetic oligonucleotide
agcagcctcagcgacagagac

SEQ ID NO: 39540 - DNA, 21 bp, Artificial Sequence
  Description of Artificial Sequence: Synthetic oligonucleotide
agcagcctcagcagaacagga

SEQ ID NO: 39541 - DNA, 21 bp, Artificial Sequence
  Description of Artificial Sequence: Synthetic oligonucleotide
agcagcatggcaaaaaaagaa

SEQ ID NO: 39542 - DNA, 21 bp, Artificial Sequence
  Description of Artificial Sequence: Synthetic oligonucleotide
agcagcatggcactcggaaca

SEQ ID NO: 39543 - DNA, 21 bp, Artificial Sequence
  Description of Artificial Sequence: Synthetic oligonucleotide
agcagcatggtcgaccaagtc

SEQ ID NO: 39544 - DNA, 21 bp, Artificial Sequence
  Description of Artificial Sequence: Synthetic oligonucleotide
agcagcaacgcaatgctccca

SEQ ID NO: 39545 - DNA, 21 bp, Artificial Sequence
  Description of Artificial Sequence: Synthetic oligonucleotide
agcagcaacgaacacatgaga

SEQ ID NO: 39546 - DNA, 21 bp, Artificial Sequence
  Description of Artificial Sequence: Synthetic oligonucleotide
agcagcaacctcaaactcagc

SEQ ID NO: 39547 - DNA, 21 bp, Artificial Sequence
  Description of Artificial Sequence: Synthetic oligonucleotide
agcagcaacccaatgctcaga

SEQ ID NO: 39548 - DNA, 21 bp, Artificial Sequence
  Description of Artificial Sequence: Synthetic oligonucleotide
agcagcaacccacaaagagtc

SEQ ID NO: 39549 - DNA, 21 bp, Artificial Sequence
  Description of Artificial Sequence: Synthetic oligonucleotide
agcagcaacagagcaagcgtc

SEQ ID NO: 39550 - DNA, 21 bp, Artificial Sequence
  Description of Artificial Sequence: Synthetic oligonucleotide
agcagcaacagaggagaactc

SEQ ID NO: 39551 - DNA, 21 bp, Artificial Sequence
  Description of Artificial Sequence: Synthetic oligonucleotide
agcagcaacagcttcccaaga

SEQ ID NO: 39552 - DNA, 21 bp, Artificial Sequence
  Description of Artificial Sequence: Synthetic oligonucleotide
agcagcaacagcggagtccca

SEQ ID NO: 39553 - DNA, 21 bp, Artificial Sequence
  Description of Artificial Sequence: Synthetic oligonucleotide
agcagcaacagcagagcaatc

SEQ ID NO: 39554 - DNA, 21 bp, Artificial Sequence
  Description of Artificial Sequence: Synthetic oligonucleotide
agcagcaacagcagcttcgca

SEQ ID NO: 39555 - DNA, 21 bp, Artificial Sequence
  Description of Artificial Sequence: Synthetic oligonucleotide
agcagcaacagcgtcatcgca

SEQ ID NO: 39556 - DNA, 21 bp, Artificial Sequence
  Description of Artificial Sequence: Synthetic oligonucleotide
agcagcccagcactcaactac

SEQ ID NO: 39557 - DNA, 21 bp, Artificial Sequence
  Description of Artificial Sequence: Synthetic oligonucleotide
agcagcccagaaggactcgca

SEQ ID NO: 39558 - DNA, 21 bp, Artificial Sequence
  Description of Artificial Sequence: Synthetic oligonucleotide
agcagcccaatgagaagcgaa

SEQ ID NO: 39559 - DNA, 21 bp, Artificial Sequence
  Description of Artificial Sequence: Synthetic oligonucleotide
agcagcccaccaggaaacgga

SEQ ID NO: 39560 - DNA, 21 bp, Artificial Sequence
  Description of Artificial Sequence: Synthetic oligonucleotide
agcagcccaagaggattcgga

SEQ ID NO: 39561 - DNA, 21 bp, Artificial Sequence
  Description of Artificial Sequence: Synthetic oligonucleotide
agcagcccaagacacagcgaa

SEQ ID NO: 39562 - DNA, 21 bp, Artificial Sequence
  Description of Artificial Sequence: Synthetic oligonucleotide
agcagcccaagcctcacactc

SEQ ID NO: 39563 - DNA, 21 bp, Artificial Sequence
  Description of Artificial Sequence: Synthetic oligonucleotide
agcagcccaagcagcaacgga

SEQ ID NO: 39564 - DNA, 21 bp, Artificial Sequence
  Description of Artificial Sequence: Synthetic oligonucleotide
agcagcccaacatgctgccca

SEQ ID NO: 39565 - DNA, 21 bp, Artificial Sequence
  Description of Artificial Sequence: Synthetic oligonucleotide
agcagcccaacaatgttcgtc

SEQ ID NO: 39566 - DNA, 21 bp, Artificial Sequence
  Description of Artificial Sequence: Synthetic oligonucleotide
agcagcccaacaccactcaaa

SEQ ID NO: 39567 - DNA, 21 bp, Artificial Sequence
  Description of Artificial Sequence: Synthetic oligonucleotide
agcagcccagtcgcaagcagc

SEQ ID NO: 39568 - DNA, 21 bp, Artificial Sequence
  Description of Artificial Sequence: Synthetic oligonucleotide
agcagcccagtcaaaacactc

SEQ ID NO: 39569 - DNA, 21 bp, Artificial Sequence
  Description of Artificial Sequence: Synthetic oligonucleotide
agcagcccatacccaatgatg

SEQ ID NO: 39570 - DNA, 21 bp, Artificial Sequence
  Description of Artificial Sequence: Synthetic oligonucleotide
agcagccaagaaagaaacgtc

SEQ ID NO: 39571 - DNA, 21 bp, Artificial Sequence
  Description of Artificial Sequence: Synthetic oligonucleotide
agcagccaaggaccaatcaga

SEQ ID NO: 39572 - DNA, 21 bp, Artificial Sequence
  Description of Artificial Sequence: Synthetic oligonucleotide
agcagccaaaaaccagtcctc

SEQ ID NO: 39573 - DNA, 21 bp, Artificial Sequence
  Description of Artificial Sequence: Synthetic oligonucleotide
agcagccaactcctcctcgac

SEQ ID NO: 39574 - DNA, 21 bp, Artificial Sequence
  Description of Artificial Sequence: Synthetic oligonucleotide
agcagccaaatgctctaccca

SEQ ID NO: 39575 - DNA, 21 bp, Artificial Sequence
  Description of Artificial Sequence: Synthetic oligonucleotide
agcagccaaccactcgaactc

SEQ ID NO: 39576 - DNA, 21 bp, Artificial Sequence
  Description of Artificial Sequence: Synthetic oligonucleotide
agcagccaaccaatgagctac

SEQ ID NO: 39577 - DNA, 21 bp, Artificial Sequence
  Description of Artificial Sequence: Synthetic oligonucleotide
agcagccaaagagtcccaagc

SEQ ID NO: 39578 - DNA, 21 bp, Artificial Sequence
  Description of Artificial Sequence: Synthetic oligonucleotide
agcagccaaagcatgacactc

SEQ ID NO: 39579 - DNA, 21 bp, Artificial Sequence
  Description of Artificial Sequence: Synthetic oligonucleotide
agcagccaagtcaaaacactc

SEQ ID NO: 39580 - DNA, 21 bp, Artificial Sequence
  Description of Artificial Sequence: Synthetic oligonucleotide
agcagccaatggcacgcagga

SEQ ID NO: 39581 - DNA, 21 bp, Artificial Sequence
  Description of Artificial Sequence: Synthetic oligonucleotide
agcagcagagcaggaacagaa

SEQ ID NO: 39582 - DNA, 21 bp, Artificial Sequence
  Description of Artificial Sequence: Synthetic oligonucleotide
agcagcagagacatgacaagc

SEQ ID NO: 39583 - DNA, 21 bp, Artificial Sequence
  Description of Artificial Sequence: Synthetic oligonucleotide
agcagcagagacgtcggaaga

SEQ ID NO: 39584 - DNA, 21 bp, Artificial Sequence
  Description of Artificial Sequence: Synthetic oligonucleotide
agcagcagaggaccaatcgca

SEQ ID NO: 39585 - DNA, 21 bp, Artificial Sequence
  Description of Artificial Sequence: Synthetic oligonucleotide
agcagcagaggaagcccaagc

SEQ ID NO: 39586 - DNA, 21 bp, Artificial Sequence
  Description of Artificial Sequence: Synthetic oligonucleotide
agcagcagaggagtcccagga

SEQ ID NO: 39587 - DNA, 21 bp, Artificial Sequence
  Description of Artificial Sequence: Synthetic oligonucleotide
agcagcagaatcaacccaatg

SEQ ID NO: 39588 - DNA, 21 bp, Artificial Sequence
  Description of Artificial Sequence: Synthetic oligonucleotide
agcagcagaatcccagacaca

SEQ ID NO: 39589 - DNA, 21 bp, Artificial Sequence
  Description of Artificial Sequence: Synthetic oligonucleotide
agcagcagactcaacgaacaa

SEQ ID NO: 39590 - DNA, 21 bp, Artificial Sequence
  Description of Artificial Sequence: Synthetic oligonucleotide
agcagcagactcagcgcagac

SEQ ID NO: 39591 - DNA, 21 bp, Artificial Sequence
  Description of Artificial Sequence: Synthetic oligonucleotide
agcagcagactcagcgaaagc

SEQ ID NO: 39592 - DNA, 21 bp, Artificial Sequence
  Description of Artificial Sequence: Synthetic oligonucleotide
agcagcagaccaggaatgagc

SEQ ID NO: 39593 - DNA, 21 bp, Artificial Sequence
  Description of Artificial Sequence: Synthetic oligonucleotide
agcagcagaccaggacaacac

SEQ ID NO: 39594 - DNA, 21 bp, Artificial Sequence
  Description of Artificial Sequence: Synthetic oligonucleotide
agcagcagaccaaacgacgac

SEQ ID NO: 39595 - DNA, 21 bp, Artificial Sequence
  Description of Artificial Sequence: Synthetic oligonucleotide
agcagcagaccaagcggaagc

SEQ ID NO: 39596 - DNA, 21 bp, Artificial Sequence
  Description of Artificial Sequence: Synthetic oligonucleotide
agcagcagaagcgcacaaagc

SEQ ID NO: 39597 - DNA, 21 bp, Artificial Sequence
  Description of Artificial Sequence: Synthetic oligonucleotide
agcagcagaagcccagacctc

SEQ ID NO: 39598 - DNA, 21 bp, Artificial Sequence
  Description of Artificial Sequence: Synthetic oligonucleotide
agcagcagaacaaacagctac

SEQ ID NO: 39599 - DNA, 21 bp, Artificial Sequence
  Description of Artificial Sequence: Synthetic oligonucleotide
agcagcagaacagtcgaagca

SEQ ID NO: 39600 - DNA, 21 bp, Artificial Sequence
  Description of Artificial Sequence: Synthetic oligonucleotide
agcagcagcgcactcgtcctc

SEQ ID NO: 39601 - DNA, 21 bp, Artificial Sequence
  Description of Artificial Sequence: Synthetic oligonucleotide
agcagcagcgcagtcgcaagc

SEQ ID NO: 39602 - DNA, 21 bp, Artificial Sequence
  Description of Artificial Sequence: Synthetic oligonucleotide
agcagcagcgaaagcgcatgg

SEQ ID NO: 39603 - DNA, 21 bp, Artificial Sequence
  Description of Artificial Sequence: Synthetic oligonucleotide
agcagcagcggaacacaccca

SEQ ID NO: 39604 - DNA, 21 bp, Artificial Sequence
  Description of Artificial Sequence: Synthetic oligonucleotide
agcagcagcatcatcagaaca

SEQ ID NO: 39605 - DNA, 21 bp, Artificial Sequence
  Description of Artificial Sequence: Synthetic oligonucleotide
agcagcagcatcagagcaaac

SEQ ID NO: 39606 - DNA, 21 bp, Artificial Sequence
  Description of Artificial Sequence: Synthetic oligonucleotide
agcagcagcaaaccacacctc

SEQ ID NO: 39607 - DNA, 21 bp, Artificial Sequence
  Description of Artificial Sequence: Synthetic oligonucleotide
agcagcagcctcgacagcaga

SEQ ID NO: 39608 - DNA, 21 bp, Artificial Sequence
  Description of Artificial Sequence: Synthetic oligonucleotide
agcagcagcctccaactcgga

SEQ ID NO: 39609 - DNA, 21 bp, Artificial Sequence
  Description of Artificial Sequence: Synthetic oligonucleotide
agcagcagcctcagccacagc

SEQ ID NO: 39610 - DNA, 21 bp, Artificial Sequence
  Description of Artificial Sequence: Synthetic oligonucleotide
agcagcagcatgagagaaaga

SEQ ID NO: 39611 - DNA, 21 bp, Artificial Sequence
  Description of Artificial Sequence: Synthetic oligonucleotide
agcagcagcaacacactcaca

SEQ ID NO: 39612 - DNA, 21 bp, Artificial Sequence
  Description of Artificial Sequence: Synthetic oligonucleotide
agcagcagcagagcagtcgaa

SEQ ID NO: 39613 - DNA, 21 bp, Artificial Sequence
  Description of Artificial Sequence: Synthetic oligonucleotide
agcagcagcagaccaacacaa

SEQ ID NO: 39614 - DNA, 21 bp, Artificial Sequence
  Description of Artificial Sequence: Synthetic oligonucleotide
agcagcagcagcaaaacacca

SEQ ID NO: 39615 - DNA, 21 bp, Artificial Sequence
  Description of Artificial Sequence: Synthetic oligonucleotide
agcagcagcagcctctacaca

SEQ ID NO: 39616 - DNA, 21 bp, Artificial Sequence
  Description of Artificial Sequence: Synthetic oligonucleotide
agcagcagcagcccaagagca

SEQ ID NO: 39617 - DNA, 21 bp, Artificial Sequence
  Description of Artificial Sequence: Synthetic oligonucleotide
agcagcagcagcagcagacca

SEQ ID NO: 39618 - DNA, 21 bp, Artificial Sequence
  Description of Artificial Sequence: Synthetic oligonucleotide
agcagcagcagcgtcagagca

SEQ ID NO: 39619 - DNA, 21 bp, Artificial Sequence
  Description of Artificial Sequence: Synthetic oligonucleotide
agcagcagcacaccaccactc

SEQ ID NO: 39620 - DNA, 21 bp, Artificial Sequence
  Description of Artificial Sequence: Synthetic oligonucleotide
agcagcagcacaccaccaagc

SEQ ID NO: 39621 - DNA, 21 bp, Artificial Sequence
  Description of Artificial Sequence: Synthetic oligonucleotide
agcagcagcacaccaccaaca

SEQ ID NO: 39622 - DNA, 21 bp, Artificial Sequence
  Description of Artificial Sequence: Synthetic oligonucleotide
agcagcagcacaagcacagga

SEQ ID NO: 39623 - DNA, 21 bp, Artificial Sequence
  Description of Artificial Sequence: Synthetic oligonucleotide
agcagcagcacagtccaattc

SEQ ID NO: 39624 - DNA, 21 bp, Artificial Sequence
  Description of Artificial Sequence: Synthetic oligonucleotide
agcagcagcgtcagcaacaac

SEQ ID NO: 39625 - DNA, 21 bp, Artificial Sequence
  Description of Artificial Sequence: Synthetic oligonucleotide
agcagcagctacaacggaaaa

SEQ ID NO: 39626 - DNA, 21 bp, Artificial Sequence
  Description of Artificial Sequence: Synthetic oligonucleotide
agcagcacagaaagcatcaga

SEQ ID NO: 39627 - DNA, 21 bp, Artificial Sequence
  Description of Artificial Sequence: Synthetic oligonucleotide
agcagcacacacgaaaaacca

SEQ ID NO: 39628 - DNA, 21 bp, Artificial Sequence
  Description of Artificial Sequence: Synthetic oligonucleotide
agcagcacaaaaagcctcgca

SEQ ID NO: 39629 - DNA, 21 bp, Artificial Sequence
  Description of Artificial Sequence: Synthetic oligonucleotide
agcagcacaccaccaaaatac

SEQ ID NO: 39630 - DNA, 21 bp, Artificial Sequence
  Description of Artificial Sequence: Synthetic oligonucleotide
agcagcacaccaacaagccac

SEQ ID NO: 39631 - DNA, 21 bp, Artificial Sequence
  Description of Artificial Sequence: Synthetic oligonucleotide
agcagcacaccaacaacagca

SEQ ID NO: 39632 - DNA, 21 bp, Artificial Sequence
  Description of Artificial Sequence: Synthetic oligonucleotide
agcagcacaagagacgcacac

SEQ ID NO: 39633 - DNA, 21 bp, Artificial Sequence
  Description of Artificial Sequence: Synthetic oligonucleotide
agcagcacaagaacaccacca

SEQ ID NO: 39634 - DNA, 21 bp, Artificial Sequence
  Description of Artificial Sequence: Synthetic oligonucleotide
agcagcacaagcagcagattc

SEQ ID NO: 39635 - DNA, 21 bp, Artificial Sequence
  Description of Artificial Sequence: Synthetic oligonucleotide
agcagcacaagcacactcctc

SEQ ID NO: 39636 - DNA, 21 bp, Artificial Sequence
  Description of Artificial Sequence: Synthetic oligonucleotide
agcagcacaacaatgatcgaa

SEQ ID NO: 39637 - DNA, 21 bp, Artificial Sequence
  Description of Artificial Sequence: Synthetic oligonucleotide
agcagcgtcgcaagcacagtc

SEQ ID NO: 39638 - DNA, 21 bp, Artificial Sequence
  Description of Artificial Sequence: Synthetic oligonucleotide
agcagcgtcggaagcgcagga

SEQ ID NO: 39639 - DNA, 21 bp, Artificial Sequence
  Description of Artificial Sequence: Synthetic oligonucleotide
agcagcgtccacctctaccca

SEQ ID NO: 39640 - DNA, 21 bp, Artificial Sequence
  Description of Artificial Sequence: Synthetic oligonucleotide
agcagcgtccacagcagaatg

SEQ ID NO: 39641 - DNA, 21 bp, Artificial Sequence
  Description of Artificial Sequence: Synthetic oligonucleotide
agcagcgtcaacacaagcgga

SEQ ID NO: 39642 - DNA, 21 bp, Artificial Sequence
  Description of Artificial Sequence: Synthetic oligonucleotide
agcagcgtcccaagaccaagc

SEQ ID NO: 39643 - DNA, 21 bp, Artificial Sequence
  Description of Artificial Sequence: Synthetic oligonucleotide
agcagcgtcagactcctcagc

SEQ ID NO: 39644 - DNA, 21 bp, Artificial Sequence
  Description of Artificial Sequence: Synthetic oligonucleotide
agcagcgtcagcggactcagc

SEQ ID NO: 39645 - DNA, 21 bp, Artificial Sequence
  Description of Artificial Sequence: Synthetic oligonucleotide
agcagcgtcacaagaacagga

SEQ ID NO: 39646 - DNA, 21 bp, Artificial Sequence
  Description of Artificial Sequence: Synthetic oligonucleotide
agcagcgtcacagtcagcagc

SEQ ID NO: 39647 - DNA, 21 bp, Artificial Sequence
  Description of Artificial Sequence: Synthetic oligonucleotide
agcagcgtcgtccacggagtc

SEQ ID NO: 39648 - DNA, 21 bp, Artificial Sequence
  Description of Artificial Sequence: Synthetic oligonucleotide
agcagcgtcgtcccaagcatg

SEQ ID NO: 39649 - DNA, 21 bp, Artificial Sequence
  Description of Artificial Sequence: Synthetic oligonucleotide
agcagctggcaaccattcgaa

SEQ ID NO: 39650 - DNA, 21 bp, Artificial Sequence
  Description of Artificial Sequence: Synthetic oligonucleotide
agcagctacgcaccactccac

SEQ ID NO: 39651 - DNA, 21 bp, Artificial Sequence
  Description of Artificial Sequence: Synthetic oligonucleotide
agcagctacgcaagcggaagc

SEQ ID NO: 39652 - DNA, 21 bp, Artificial Sequence
  Description of Artificial Sequence: Synthetic oligonucleotide
agcagctacgacagcagcaaa

SEQ ID NO: 39653 - DNA, 21 bp, Artificial Sequence
  Description of Artificial Sequence: Synthetic oligonucleotide
agcagctacgaaaaaggaaca

SEQ ID NO: 39654 - DNA, 21 bp, Artificial Sequence
  Description of Artificial Sequence: Synthetic oligonucleotide
agcagctaccacggactcaca

SEQ ID NO: 39655 - DNA, 21 bp, Artificial Sequence
  Description of Artificial Sequence: Synthetic oligonucleotide
agcagctaccacccagcagaa

SEQ ID NO: 39656 - DNA, 21 bp, Artificial Sequence
  Description of Artificial Sequence: Synthetic oligonucleotide
agcagctacccaggacacagc

SEQ ID NO: 39657 - DNA, 21 bp, Artificial Sequence
  Description of Artificial Sequence: Synthetic oligonucleotide
agcagctacagcgtcccagaa

SEQ ID NO: 39658 - DNA, 21 bp, Artificial Sequence
  Description of Artificial Sequence: Synthetic oligonucleotide
agcacagcaatcacaatccac

SEQ ID NO: 39659 - DNA, 21 bp, Artificial Sequence
  Description of Artificial Sequence: Synthetic oligonucleotide
agcacagcactcggaatcgtc

SEQ ID NO: 39660 - DNA, 21 bp, Artificial Sequence
  Description of Artificial Sequence: Synthetic oligonucleotide
agcacagcaaacgcacaaaca

SEQ ID NO: 39661 - DNA, 21 bp, Artificial Sequence
  Description of Artificial Sequence: Synthetic oligonucleotide
agcacagcaccaggagcagca

SEQ ID NO: 39662 - DNA, 21 bp, Artificial Sequence
  Description of Artificial Sequence: Synthetic oligonucleotide
agcacagcaagagcaagcaca

SEQ ID NO: 39663 - DNA, 21 bp, Artificial Sequence
  Description of Artificial Sequence: Synthetic oligonucleotide
agcacagcaagactcagagac

SEQ ID NO: 39664 - DNA, 21 bp, Artificial Sequence
  Description of Artificial Sequence: Synthetic oligonucleotide
agcacagcaacacaactcatg

SEQ ID NO: 39665 - DNA, 21 bp, Artificial Sequence
  Description of Artificial Sequence: Synthetic oligonucleotide
agcacatgccacccaagcgga

SEQ ID NO: 39666 - DNA, 21 bp, Artificial Sequence
  Description of Artificial Sequence: Synthetic oligonucleotide
agcacagacgaacacgtcatg

SEQ ID NO: 39667 - DNA, 21 bp, Artificial Sequence
  Description of Artificial Sequence: Synthetic oligonucleotide
agcacagaccacacagcatac

SEQ ID NO: 39668 - DNA, 21 bp, Artificial Sequence
  Description of Artificial Sequence: Synthetic oligonucleotide
agcacagacctcagacaagca

SEQ ID NO: 39669 - DNA, 21 bp, Artificial Sequence
  Description of Artificial Sequence: Synthetic oligonucleotide
agcacagacatgagacacatc

SEQ ID NO: 39670 - DNA, 21 bp, Artificial Sequence
  Description of Artificial Sequence: Synthetic oligonucleotide
agcacagacaacgacctcaga

SEQ ID NO: 39671 - DNA, 21 bp, Artificial Sequence
  Description of Artificial Sequence: Synthetic oligonucleotide
agcacagacacaaaccaccaa

SEQ ID NO: 39672 - DNA, 21 bp, Artificial Sequence
  Description of Artificial Sequence: Synthetic oligonucleotide
agcacagacgtcaaaacacaa

SEQ ID NO: 39673 - DNA, 21 bp, Artificial Sequence
  Description of Artificial Sequence: Synthetic oligonucleotide
agcacagaattcaaaagcgca

SEQ ID NO: 39674 - DNA, 21 bp, Artificial Sequence
  Description of Artificial Sequence: Synthetic oligonucleotide
agcacagaaagaccaatgcca

SEQ ID NO: 39675 - DNA, 21 bp, Artificial Sequence
  Description of Artificial Sequence: Synthetic oligonucleotide
agcacagaaacagcacaaagc

SEQ ID NO: 39676 - DNA, 21 bp, Artificial Sequence
  Description of Artificial Sequence: Synthetic oligonucleotide
agcacattcaaaaacgtcgtc

SEQ ID NO: 39677 - DNA, 21 bp, Artificial Sequence
  Description of Artificial Sequence: Synthetic oligonucleotide
agcacattcaacagcgcagga

SEQ ID NO: 39678 - DNA, 21 bp, Artificial Sequence
  Description of Artificial Sequence: Synthetic oligonucleotide
agcacattcagcagcagcatg

SEQ ID NO: 39679 - DNA, 21 bp, Artificial Sequence
  Description of Artificial Sequence: Synthetic oligonucleotide
agcacattcgtcacagcagga

SEQ ID NO: 39680 - DNA, 21 bp, Artificial Sequence
  Description of Artificial Sequence: Synthetic oligonucleotide
agcacattcgtcacaagaagc

SEQ ID NO: 39681 - DNA, 21 bp, Artificial Sequence
  Description of Artificial Sequence: Synthetic oligonucleotide
agcacaggagcactcccaagc

SEQ ID NO: 39682 - DNA, 21 bp, Artificial Sequence
  Description of Artificial Sequence: Synthetic oligonucleotide
agcacaggagcaatgctccac

SEQ ID NO: 39683 - DNA, 21 bp, Artificial Sequence
  Description of Artificial Sequence: Synthetic oligonucleotide
agcacaggagcaccaccagac

SEQ ID NO: 39684 - DNA, 21 bp, Artificial Sequence
  Description of Artificial Sequence: Synthetic oligonucleotide
agcacaggaatgggagcattc

SEQ ID NO: 39685 - DNA, 21 bp, Artificial Sequence
  Description of Artificial Sequence: Synthetic oligonucleotide
agcacaggaccattcctccca

SEQ ID NO: 39686 - DNA, 21 bp, Artificial Sequence
  Description of Artificial Sequence: Synthetic oligonucleotide
agcacaggaagcgcacaaaca

SEQ ID NO: 39687 - DNA, 21 bp, Artificial Sequence
  Description of Artificial Sequence: Synthetic oligonucleotide
agcacaggaagcacactccaa

SEQ ID NO: 39688 - DNA, 21 bp, Artificial Sequence
  Description of Artificial Sequence: Synthetic oligonucleotide
agcacaggatacggaggactc

SEQ ID NO: 39689 - DNA, 21 bp, Artificial Sequence
  Description of Artificial Sequence: Synthetic oligonucleotide
agcacacacatcagcccacca

SEQ ID NO: 39690 - DNA, 21 bp, Artificial Sequence
  Description of Artificial Sequence: Synthetic oligonucleotide
agcacacacatgagactcgca

SEQ ID NO: 39691 - DNA, 21 bp, Artificial Sequence
  Description of Artificial Sequence: Synthetic oligonucleotide
agcacacacaacctcacaagc

SEQ ID NO: 39692 - DNA, 21 bp, Artificial Sequence
  Description of Artificial Sequence: Synthetic oligonucleotide
agcacacacagagacagcagc

SEQ ID NO: 39693 - DNA, 21 bp, Artificial Sequence
  Description of Artificial Sequence: Synthetic oligonucleotide
agcacacacagaagcctcgca

SEQ ID NO: 39694 - DNA, 21 bp, Artificial Sequence
  Description of Artificial Sequence: Synthetic oligonucleotide
agcacacacagctacccagtc

SEQ ID NO: 39695 - DNA, 21 bp, Artificial Sequence
  Description of Artificial Sequence: Synthetic oligonucleotide
agcacacacgtcagcagcaca

SEQ ID NO: 39696 - DNA, 21 bp, Artificial Sequence
  Description of Artificial Sequence: Synthetic oligonucleotide
agcacaatcgcaggaacacca

SEQ ID NO: 39697 - DNA, 21 bp, Artificial Sequence
  Description of Artificial Sequence: Synthetic oligonucleotide
agcacaatcagcgcactcgca

SEQ ID NO: 39698 - DNA, 21 bp, Artificial Sequence
  Description of Artificial Sequence: Synthetic oligonucleotide
agcacaaaagaaagccaactc

SEQ ID NO: 39699 - DNA, 21 bp, Artificial Sequence
  Description of Artificial Sequence: Synthetic oligonucleotide
agcacaaaaagcggaacacca

SEQ ID NO: 39700 - DNA, 21 bp, Artificial Sequence
  Description of Artificial Sequence: Synthetic oligonucleotide
agcacaaaaacaccaccagca

SEQ ID NO: 39701 - DNA, 21 bp, Artificial Sequence
  Description of Artificial Sequence: Synthetic oligonucleotide
agcacaaaatacagcagcgtc

SEQ ID NO: 39702 - DNA, 21 bp, Artificial Sequence
  Description of Artificial Sequence: Synthetic oligonucleotide
agcacactcgcaagagacaac

SEQ ID NO: 39703 - DNA, 21 bp, Artificial Sequence
  Description of Artificial Sequence: Synthetic oligonucleotide
agcacactcgcaagagtccca

SEQ ID NO: 39704 - DNA, 21 bp, Artificial Sequence
  Description of Artificial Sequence: Synthetic oligonucleotide
agcacactctgcccagtcctc

SEQ ID NO: 39705 - DNA, 21 bp, Artificial Sequence
  Description of Artificial Sequence: Synthetic oligonucleotide
agcacactcggaggaggatac

SEQ ID NO: 39706 - DNA, 21 bp, Artificial Sequence
  Description of Artificial Sequence: Synthetic oligonucleotide
agcacactcaacaacgtccca

SEQ ID NO: 39707 - DNA, 21 bp, Artificial Sequence
  Description of Artificial Sequence: Synthetic oligonucleotide
agcacactcccaagcccagaa

SEQ ID NO: 39708 - DNA, 21 bp, Artificial Sequence
  Description of Artificial Sequence: Synthetic oligonucleotide
agcacactcccaagcagacca

SEQ ID NO: 39709 - DNA, 21 bp, Artificial Sequence
  Description of Artificial Sequence: Synthetic oligonucleotide
agcacactcagatgcggagaa

SEQ ID NO: 39710 - DNA, 21 bp, Artificial Sequence
  Description of Artificial Sequence: Synthetic oligonucleotide
agcacactcgtcaaaaacgca

SEQ ID NO: 39711 - DNA, 21 bp, Artificial Sequence
  Description of Artificial Sequence: Synthetic oligonucleotide
agcacactcgtcagagcagaa

SEQ ID NO: 39712 - DNA, 21 bp, Artificial Sequence
  Description of Artificial Sequence: Synthetic oligonucleotide
agcacaatggcaggaagacac

SEQ ID NO: 39713 - DNA, 21 bp, Artificial Sequence
  Description of Artificial Sequence: Synthetic oligonucleotide
agcacaatgatcgcacacagc

SEQ ID NO: 39714 - DNA, 21 bp, Artificial Sequence
  Description of Artificial Sequence: Synthetic oligonucleotide
agcacaatgctcctcccaagc

SEQ ID NO: 39715 - DNA, 21 bp, Artificial Sequence
  Description of Artificial Sequence: Synthetic oligonucleotide
agcacaatgaacagaggactc

SEQ ID NO: 39716 - DNA, 21 bp, Artificial Sequence
  Description of Artificial Sequence: Synthetic oligonucleotide
agcacaatgagaccacaactc

SEQ ID NO: 39717 - DNA, 21 bp, Artificial Sequence
  Description of Artificial Sequence: Synthetic oligonucleotide
agcacaatgagcgtcaaagaa

SEQ ID NO: 39718 - DNA, 21 bp, Artificial Sequence
  Description of Artificial Sequence: Synthetic oligonucleotide
agcacaaacgcaacaagcaac

SEQ ID NO: 39719 - DNA, 21 bp, Artificial Sequence
  Description of Artificial Sequence: Synthetic oligonucleotide
agcacaaacatcgtcgaatac

SEQ ID NO: 39720 - DNA, 21 bp, Artificial Sequence
  Description of Artificial Sequence: Synthetic oligonucleotide
agcacaaacagaagcacagtc

SEQ ID NO: 39721 - DNA, 21 bp, Artificial Sequence
  Description of Artificial Sequence: Synthetic oligonucleotide
agcacaaacacagcactctgg

SEQ ID NO: 39722 - DNA, 21 bp, Artificial Sequence
  Description of Artificial Sequence: Synthetic oligonucleotide
agcacaaacacaccaagagga

SEQ ID NO: 39723 - DNA, 21 bp, Artificial Sequence
  Description of Artificial Sequence: Synthetic oligonucleotide
agcacaaacacacaagcatac

SEQ ID NO: 39724 - DNA, 21 bp, Artificial Sequence
  Description of Artificial Sequence: Synthetic oligonucleotide
agcacaaacacaagagaagaa

SEQ ID NO: 39725 - DNA, 21 bp, Artificial Sequence
  Description of Artificial Sequence: Synthetic oligonucleotide
agcacaaacgtcggactcgca

SEQ ID NO: 39726 - DNA, 21 bp, Artificial Sequence
  Description of Artificial Sequence: Synthetic oligonucleotide
agcacaccagcaaaatacgga

SEQ ID NO: 39727 - DNA, 21 bp, Artificial Sequence
  Description of Artificial Sequence: Synthetic oligonucleotide
agcacaccagcaagcagagca

SEQ ID NO: 39728 - DNA, 21 bp, Artificial Sequence
  Description of Artificial Sequence: Synthetic oligonucleotide
agcacaccagacaaccacaca

SEQ ID NO: 39729 - DNA, 21 bp, Artificial Sequence
  Description of Artificial Sequence: Synthetic oligonucleotide
agcacaccagacagacaaaca

SEQ ID NO: 39730 - DNA, 21 bp, Artificial Sequence
  Description of Artificial Sequence: Synthetic oligonucleotide
agcacaccacacacaaacgca

SEQ ID NO: 39731 - DNA, 21 bp, Artificial Sequence
  Description of Artificial Sequence: Synthetic oligonucleotide
agcacaccaaaaccaagccca

SEQ ID NO: 39732 - DNA, 21 bp, Artificial Sequence
  Description of Artificial Sequence: Synthetic oligonucleotide
agcacaccactcatcgcaaaa

SEQ ID NO: 39733 - DNA, 21 bp, Artificial Sequence
  Description of Artificial Sequence: Synthetic oligonucleotide
agcacaccactcccaagaaca

SEQ ID NO: 39734 - DNA, 21 bp, Artificial Sequence
  Description of Artificial Sequence: Synthetic oligonucleotide
agcacaccactccaaacacca

SEQ ID NO: 39735 - DNA, 21 bp, Artificial Sequence
  Description of Artificial Sequence: Synthetic oligonucleotide
agcacaccactcagaacaagc

SEQ ID NO: 39736 - DNA, 21 bp, Artificial Sequence
  Description of Artificial Sequence: Synthetic oligonucleotide
agcacaccaaacgcaagaatc

SEQ ID NO: 39737 - DNA, 21 bp, Artificial Sequence
  Description of Artificial Sequence: Synthetic oligonucleotide
agcacaccaaacatgaacaga

SEQ ID NO: 39738 - DNA, 21 bp, Artificial Sequence
  Description of Artificial Sequence: Synthetic oligonucleotide
agcacaccaccagcaagaagc

SEQ ID NO: 39739 - DNA, 21 bp, Artificial Sequence
  Description of Artificial Sequence: Synthetic oligonucleotide
agcacaccaccactctacgaa

SEQ ID NO: 39740 - DNA, 21 bp, Artificial Sequence
  Description of Artificial Sequence: Synthetic oligonucleotide
agcacaccaccaacaacactc

SEQ ID NO: 39741 - DNA, 21 bp, Artificial Sequence
  Description of Artificial Sequence: Synthetic oligonucleotide
agcacaccaagaccacacgac

SEQ ID NO: 39742 - DNA, 21 bp, Artificial Sequence
  Description of Artificial Sequence: Synthetic oligonucleotide
agcacaccaacaggagcactc

SEQ ID NO: 39743 - DNA, 21 bp, Artificial Sequence
  Description of Artificial Sequence: Synthetic oligonucleotide
agcacacaacaaagaagcgga

SEQ ID NO: 39744 - DNA, 21 bp, Artificial Sequence
  Description of Artificial Sequence: Synthetic oligonucleotide
agcacacaaagagcagcagca

SEQ ID NO: 39745 - DNA, 21 bp, Artificial Sequence
  Description of Artificial Sequence: Synthetic oligonucleotide
agcacacaagtccacctcctc

SEQ ID NO: 39746 - DNA, 21 bp, Artificial Sequence
  Description of Artificial Sequence: Synthetic oligonucleotide
agcacacaagtccacatgatg

SEQ ID NO: 39747 - DNA, 21 bp, Artificial Sequence
  Description of Artificial Sequence: Synthetic oligonucleotide
agcacacaagtcccaaacaaa

SEQ ID NO: 39748 - DNA, 21 bp, Artificial Sequence
  Description of Artificial Sequence: Synthetic oligonucleotide
agcacacaatggagaacagaa

SEQ ID NO: 39749 - DNA, 21 bp, Artificial Sequence
  Description of Artificial Sequence: Synthetic oligonucleotide
agcacacaatacagcccagtc

SEQ ID NO: 39750 - DNA, 21 bp, Artificial Sequence
  Description of Artificial Sequence: Synthetic oligonucleotide
agcacaagagcaccaacagca

SEQ ID NO: 39751 - DNA, 21 bp, Artificial Sequence
  Description of Artificial Sequence: Synthetic oligonucleotide
agcacaagagacacaagcaac

SEQ ID NO: 39752 - DNA, 21 bp, Artificial Sequence
  Description of Artificial Sequence: Synthetic oligonucleotide
agcacaagagaagcaaaacca

SEQ ID NO: 39753 - DNA, 21 bp, Artificial Sequence
  Description of Artificial Sequence: Synthetic oligonucleotide
agcacaagagaagacgtcctc

SEQ ID NO: 39754 - DNA, 21 bp, Artificial Sequence
  Description of Artificial Sequence: Synthetic oligonucleotide
agcacaagattcaacagcaca

SEQ ID NO: 39755 - DNA, 21 bp, Artificial Sequence
  Description of Artificial Sequence: Synthetic oligonucleotide
agcacaagaccaacagtcaac

SEQ ID NO: 39756 - DNA, 21 bp, Artificial Sequence
  Description of Artificial Sequence: Synthetic oligonucleotide
agcacaagacaactccaacaa

SEQ ID NO: 39757 - DNA, 21 bp, Artificial Sequence
  Description of Artificial Sequence: Synthetic oligonucleotide
agcacaagaagcgacatgtac

SEQ ID NO: 39758 - DNA, 21 bp, Artificial Sequence
  Description of Artificial Sequence: Synthetic oligonucleotide
agcacaagaagcatcgcagga

SEQ ID NO: 39759 - DNA, 21 bp, Artificial Sequence
  Description of Artificial Sequence: Synthetic oligonucleotide
agcacaagaagcgtcgaacac

SEQ ID NO: 39760 - DNA, 21 bp, Artificial Sequence
  Description of Artificial Sequence: Synthetic oligonucleotide
agcacaagaacagtcagcaac

SEQ ID NO: 39761 - DNA, 21 bp, Artificial Sequence
  Description of Artificial Sequence: Synthetic oligonucleotide
agcacaagagtcctcacaaca

SEQ ID NO: 39762 - DNA, 21 bp, Artificial Sequence
  Description of Artificial Sequence: Synthetic oligonucleotide
agcacaagcgcaaacctcgga

SEQ ID NO: 39763 - DNA, 21 bp, Artificial Sequence
  Description of Artificial Sequence: Synthetic oligonucleotide
agcacaagcgacacatggaaa

SEQ ID NO: 39764 - DNA, 21 bp, Artificial Sequence
  Description of Artificial Sequence: Synthetic oligonucleotide
agcacaagcgaaggactcaaa

SEQ ID NO: 39765 - DNA, 21 bp, Artificial Sequence
  Description of Artificial Sequence: Synthetic oligonucleotide
agcacaagcgaaatcgacaga

SEQ ID NO: 39766 - DNA, 21 bp, Artificial Sequence
  Description of Artificial Sequence: Synthetic oligonucleotide
agcacaagcttcgcagtcgga

SEQ ID NO: 39767 - DNA, 21 bp, Artificial Sequence
  Description of Artificial Sequence: Synthetic oligonucleotide
agcacaagcaaagcacaatgc

SEQ ID NO: 39768 - DNA, 21 bp, Artificial Sequence
  Description of Artificial Sequence: Synthetic oligonucleotide
agcacaagcaaagcacaaatc

SEQ ID NO: 39769 - DNA, 21 bp, Artificial Sequence
  Description of Artificial Sequence: Synthetic oligonucleotide
agcacaagcaaatacatgcac

SEQ ID NO: 39770 - DNA, 21 bp, Artificial Sequence
  Description of Artificial Sequence: Synthetic oligonucleotide
agcacaagcctcgcagtccaa

SEQ ID NO: 39771 - DNA, 21 bp, Artificial Sequence
  Description of Artificial Sequence: Synthetic oligonucleotide
agcacaagcctcggataccaa

SEQ ID NO: 39772 - DNA, 21 bp, Artificial Sequence
  Description of Artificial Sequence: Synthetic oligonucleotide
agcacaagcctcccaagctgc

SEQ ID NO: 39773 - DNA, 21 bp, Artificial Sequence
  Description of Artificial Sequence: Synthetic oligonucleotide
agcacaagcatgatgagcgca

SEQ ID NO: 39774 - DNA, 21 bp, Artificial Sequence
  Description of Artificial Sequence: Synthetic oligonucleotide
agcacaagcatgagcagaaca

SEQ ID NO: 39775 - DNA, 21 bp, Artificial Sequence
  Description of Artificial Sequence: Synthetic oligonucleotide
agcacaagccaaccactccca

SEQ ID NO: 39776 - DNA, 21 bp, Artificial Sequence
  Description of Artificial Sequence: Synthetic oligonucleotide
agcacaagcagaaacatgagc

SEQ ID NO: 39777 - DNA, 21 bp, Artificial Sequence
  Description of Artificial Sequence: Synthetic oligonucleotide
agcacaagcagcctcagcgca

SEQ ID NO: 39778 - DNA, 21 bp, Artificial Sequence
  Description of Artificial Sequence: Synthetic oligonucleotide
agcacaagcagcccaagacac

SEQ ID NO: 39779 - DNA, 21 bp, Artificial Sequence
  Description of Artificial Sequence: Synthetic oligonucleotide
agcacaagcagcagcctctac

SEQ ID NO: 39780 - DNA, 21 bp, Artificial Sequence
  Description of Artificial Sequence: Synthetic oligonucleotide
agcacaagcagcacactcagc

SEQ ID NO: 39781 - DNA, 21 bp, Artificial Sequence
  Description of Artificial Sequence: Synthetic oligonucleotide
agcacaagcacaggagcacca

SEQ ID NO: 39782 - DNA, 21 bp, Artificial Sequence
  Description of Artificial Sequence: Synthetic oligonucleotide
agcacaagcacactcccactc

SEQ ID NO: 39783 - DNA, 21 bp, Artificial Sequence
  Description of Artificial Sequence: Synthetic oligonucleotide
agcacaagcacactcgtccac

SEQ ID NO: 39784 - DNA, 21 bp, Artificial Sequence
  Description of Artificial Sequence: Synthetic oligonucleotide
agcacaagcgtcccaccaaaa

SEQ ID NO: 39785 - DNA, 21 bp, Artificial Sequence
  Description of Artificial Sequence: Synthetic oligonucleotide
agcacaagcgtcagacaaaca

SEQ ID NO: 39786 - DNA, 21 bp, Artificial Sequence
  Description of Artificial Sequence: Synthetic oligonucleotide
agcacaacagcaaaagcaatg

SEQ ID NO: 39787 - DNA, 21 bp, Artificial Sequence
  Description of Artificial Sequence: Synthetic oligonucleotide
agcacaacagcacaaacaaaa

SEQ ID NO: 39788 - DNA, 21 bp, Artificial Sequence
  Description of Artificial Sequence: Synthetic oligonucleotide
agcacaacagcaagaagccac

SEQ ID NO: 39789 - DNA, 21 bp, Artificial Sequence
  Description of Artificial Sequence: Synthetic oligonucleotide
agcacaacagacaaaccaagc

SEQ ID NO: 39790 - DNA, 21 bp, Artificial Sequence
  Description of Artificial Sequence: Synthetic oligonucleotide
agcacaacacacgacggaaga

SEQ ID NO: 39791 - DNA, 21 bp, Artificial Sequence
  Description of Artificial Sequence: Synthetic oligonucleotide
agcacaacacacggaagagac

SEQ ID NO: 39792 - DNA, 21 bp, Artificial Sequence
  Description of Artificial Sequence: Synthetic oligonucleotide
agcacaacactccactacgtc

SEQ ID NO: 39793 - DNA, 21 bp, Artificial Sequence
  Description of Artificial Sequence: Synthetic oligonucleotide
agcacaacactcaaaatgcca

SEQ ID NO: 39794 - DNA, 21 bp, Artificial Sequence
  Description of Artificial Sequence: Synthetic oligonucleotide
agcacaacactcaacggactc

SEQ ID NO: 39795 - DNA, 21 bp, Artificial Sequence
  Description of Artificial Sequence: Synthetic oligonucleotide
agcacaacactcacaccactc

SEQ ID NO: 39796 - DNA, 21 bp, Artificial Sequence
  Description of Artificial Sequence: Synthetic oligonucleotide
agcacaacaaacatgctcctc

SEQ ID NO: 39797 - DNA, 21 bp, Artificial Sequence
  Description of Artificial Sequence: Synthetic oligonucleotide
agcacaacaccaagcccaatg

SEQ ID NO: 39798 - DNA, 21 bp, Artificial Sequence
  Description of Artificial Sequence: Synthetic oligonucleotide
agcacaacaagaagcctcctc

SEQ ID NO: 39799 - DNA, 21 bp, Artificial Sequence
  Description of Artificial Sequence: Synthetic oligonucleotide
agcacaacaagaacaggagga

SEQ ID NO: 39800 - DNA, 21 bp, Artificial Sequence
  Description of Artificial Sequence: Synthetic oligonucleotide
agcacaacaagaacaacactc

SEQ ID NO: 39801 - DNA, 21 bp, Artificial Sequence
  Description of Artificial Sequence: Synthetic oligonucleotide
agcacaacaagcccaagcaga

SEQ ID NO: 39802 - DNA, 21 bp, Artificial Sequence
  Description of Artificial Sequence: Synthetic oligonucleotide
agcacaacaagcagagtcgaa

SEQ ID NO: 39803 - DNA, 21 bp, Artificial Sequence
  Description of Artificial Sequence: Synthetic oligonucleotide
agcacaacaagcacactcaca

SEQ ID NO: 39804 - DNA, 21 bp, Artificial Sequence
  Description of Artificial Sequence: Synthetic oligonucleotide
agcacaacagtcatcacacca

SEQ ID NO: 39805 - DNA, 21 bp, Artificial Sequence
  Description of Artificial Sequence: Synthetic oligonucleotide
agcacagtcatcaaaatgaac

SEQ ID NO: 39806 - DNA, 21 bp, Artificial Sequence
  Description of Artificial Sequence: Synthetic oligonucleotide
agcacagtcatcaacccaaca

SEQ ID NO: 39807 - DNA, 21 bp, Artificial Sequence
  Description of Artificial Sequence: Synthetic oligonucleotide
agcacagtcatcccaacacca

SEQ ID NO: 39808 - DNA, 21 bp, Artificial Sequence
  Description of Artificial Sequence: Synthetic oligonucleotide
agcacagtcctcctcacagca

SEQ ID NO: 39809 - DNA, 21 bp, Artificial Sequence
  Description of Artificial Sequence: Synthetic oligonucleotide
agcacagtcatgacaaaagtc

SEQ ID NO: 39810 - DNA, 21 bp, Artificial Sequence
  Description of Artificial Sequence: Synthetic oligonucleotide
agcacatacatgacacacagc

SEQ ID NO: 39811 - DNA, 21 bp, Artificial Sequence
  Description of Artificial Sequence: Synthetic oligonucleotide
agcacatacaacagcccagaa

SEQ ID NO: 39812 - DNA, 21 bp, Artificial Sequence
  Description of Artificial Sequence: Synthetic oligonucleotide
agcgtcgcagcacaccaacac

SEQ ID NO: 39813 - DNA, 21 bp, Artificial Sequence
  Description of Artificial Sequence: Synthetic oligonucleotide
agcgtcgcagcaatcaaacca

SEQ ID NO: 39814 - DNA, 21 bp, Artificial Sequence
  Description of Artificial Sequence: Synthetic oligonucleotide
agcgtcgcagcagtcagcctc

SEQ ID NO: 39815 - DNA, 21 bp, Artificial Sequence
  Description of Artificial Sequence: Synthetic oligonucleotide
agcgtcgcaggactcatcaaa

SEQ ID NO: 39816 - DNA, 21 bp, Artificial Sequence
  Description of Artificial Sequence: Synthetic oligonucleotide
agcgtcgcacacaacagagca

SEQ ID NO: 39817 - DNA, 21 bp, Artificial Sequence
  Description of Artificial Sequence: Synthetic oligonucleotide
agcgtcgcacactacggactc

SEQ ID NO: 39818 - DNA, 21 bp, Artificial Sequence
  Description of Artificial Sequence: Synthetic oligonucleotide
agcgtcgcaccagcaacactc

SEQ ID NO: 39819 - DNA, 21 bp, Artificial Sequence
  Description of Artificial Sequence: Synthetic oligonucleotide
agcgtcgcaccagtcaaagca

SEQ ID NO: 39820 - DNA, 21 bp, Artificial Sequence
  Description of Artificial Sequence: Synthetic oligonucleotide
agcgtcgcaagaaacagccca

SEQ ID NO: 39821 - DNA, 21 bp, Artificial Sequence
  Description of Artificial Sequence: Synthetic oligonucleotide
agcgtcgcaagcatgagcagc

SEQ ID NO: 39822 - DNA, 21 bp, Artificial Sequence
  Description of Artificial Sequence: Synthetic oligonucleotide
agcgtcgcaacagcacaaaca

SEQ ID NO: 39823 - DNA, 21 bp, Artificial Sequence
  Description of Artificial Sequence: Synthetic oligonucleotide
agcgtcgacgcagtcacagga

SEQ ID NO: 39824 - DNA, 21 bp, Artificial Sequence
  Description of Artificial Sequence: Synthetic oligonucleotide
agcgtcgacgaaggagcaaga

SEQ ID NO: 39825 - DNA, 21 bp, Artificial Sequence
  Description of Artificial Sequence: Synthetic oligonucleotide
agcgtcgacccacacaaccca

SEQ ID NO: 39826 - DNA, 21 bp, Artificial Sequence
  Description of Artificial Sequence: Synthetic oligonucleotide
agcgtcgacagcagcatcatc

SEQ ID NO: 39827 - DNA, 21 bp, Artificial Sequence
  Description of Artificial Sequence: Synthetic oligonucleotide
agcgtcgacacaggacacagc

SEQ ID NO: 39828 - DNA, 21 bp, Artificial Sequence
  Description of Artificial Sequence: Synthetic oligonucleotide
agcgtcgactacgtcggagtc

SEQ ID NO: 39829 - DNA, 21 bp, Artificial Sequence
  Description of Artificial Sequence: Synthetic oligonucleotide
agcgtcgaattcagcgacgca

SEQ ID NO: 39830 - DNA, 21 bp, Artificial Sequence
  Description of Artificial Sequence: Synthetic oligonucleotide
agcgtcgaaaaagacgaccac

SEQ ID NO: 39831 - DNA, 21 bp, Artificial Sequence
  Description of Artificial Sequence: Synthetic oligonucleotide
agcgtcgaaacaggaagagtc

SEQ ID NO: 39832 - DNA, 21 bp, Artificial Sequence
  Description of Artificial Sequence: Synthetic oligonucleotide
agcgtcgaaacaacaaactac

SEQ ID NO: 39833 - DNA, 21 bp, Artificial Sequence
  Description of Artificial Sequence: Synthetic oligonucleotide
agcgtcgaagtcagcagagca

SEQ ID NO: 39834 - DNA, 21 bp, Artificial Sequence
  Description of Artificial Sequence: Synthetic oligonucleotide
agcgtcttcaaatgcgaacca

SEQ ID NO: 39835 - DNA, 21 bp, Artificial Sequence
  Description of Artificial Sequence: Synthetic oligonucleotide
agcgtcttcccacacagcgca

SEQ ID NO: 39836 - DNA, 21 bp, Artificial Sequence
  Description of Artificial Sequence: Synthetic oligonucleotide
agcgtcttcccactcccacac

SEQ ID NO: 39837 - DNA, 21 bp, Artificial Sequence
  Description of Artificial Sequence: Synthetic oligonucleotide
agcgtcggagacaacggaagc

SEQ ID NO: 39838 - DNA, 21 bp, Artificial Sequence
  Description of Artificial Sequence: Synthetic oligonucleotide
agcgtcggactccaactcgaa

SEQ ID NO: 39839 - DNA, 21 bp, Artificial Sequence
  Description of Artificial Sequence: Synthetic oligonucleotide
agcgtcggaagcgcaatggaa

SEQ ID NO: 39840 - DNA, 21 bp, Artificial Sequence
  Description of Artificial Sequence: Synthetic oligonucleotide
agcgtcggaagctacagccca

SEQ ID NO: 39841 - DNA, 21 bp, Artificial Sequence
  Description of Artificial Sequence: Synthetic oligonucleotide
agcgtcggaagctacgtcgac

SEQ ID NO: 39842 - DNA, 21 bp, Artificial Sequence
  Description of Artificial Sequence: Synthetic oligonucleotide
agcgtcggaacaaaagacgac

SEQ ID NO: 39843 - DNA, 21 bp, Artificial Sequence
  Description of Artificial Sequence: Synthetic oligonucleotide
agcgtccacgaccacagaagc

SEQ ID NO: 39844 - DNA, 21 bp, Artificial Sequence
  Description of Artificial Sequence: Synthetic oligonucleotide
agcgtccacgaacacagcatg

SEQ ID NO: 39845 - DNA, 21 bp, Artificial Sequence
  Description of Artificial Sequence: Synthetic oligonucleotide
agcgtccacccaaaccaagca

SEQ ID NO: 39846 - DNA, 21 bp, Artificial Sequence
  Description of Artificial Sequence: Synthetic oligonucleotide
agcgtcatcctcagagcaaca

SEQ ID NO: 39847 - DNA, 21 bp, Artificial Sequence
  Description of Artificial Sequence: Synthetic oligonucleotide
agcgtcatcaacagcagagga

SEQ ID NO: 39848 - DNA, 21 bp, Artificial Sequence
  Description of Artificial Sequence: Synthetic oligonucleotide
agcgtcatcagcagaagcgaa

SEQ ID NO: 39849 - DNA, 21 bp, Artificial Sequence
  Description of Artificial Sequence: Synthetic oligonucleotide
agcgtcatcacatgggaagac

SEQ ID NO: 39850 - DNA, 21 bp, Artificial Sequence
  Description of Artificial Sequence: Synthetic oligonucleotide
agcgtcaaaccactcaaccac

SEQ ID NO: 39851 - DNA, 21 bp, Artificial Sequence
  Description of Artificial Sequence: Synthetic oligonucleotide
agcgtcaaagtcctcagacca

SEQ ID NO: 39852 - DNA, 21 bp, Artificial Sequence
  Description of Artificial Sequence: Synthetic oligonucleotide
agcgtcctcgacggaccacca

SEQ ID NO: 39853 - DNA, 21 bp, Artificial Sequence
  Description of Artificial Sequence: Synthetic oligonucleotide
agcgtcctcaacctcccaagc

SEQ ID NO: 39854 - DNA, 21 bp, Artificial Sequence
  Description of Artificial Sequence: Synthetic oligonucleotide
agcgtcctcccagaaccaagc

SEQ ID NO: 39855 - DNA, 21 bp, Artificial Sequence
  Description of Artificial Sequence: Synthetic oligonucleotide
agcgtcctcagacacccaaca

SEQ ID NO: 39856 - DNA, 21 bp, Artificial Sequence
  Description of Artificial Sequence: Synthetic oligonucleotide
agcgtcctcagaacaacacca

SEQ ID NO: 39857 - DNA, 21 bp, Artificial Sequence
  Description of Artificial Sequence: Synthetic oligonucleotide
agcgtcctcagcgcagtccca

SEQ ID NO: 39858 - DNA, 21 bp, Artificial Sequence
  Description of Artificial Sequence: Synthetic oligonucleotide
agcgtcctcagcatcgacaga

SEQ ID NO: 39859 - DNA, 21 bp, Artificial Sequence
  Description of Artificial Sequence: Synthetic oligonucleotide
agcgtcctcagcagcagcgtc

SEQ ID NO: 39860 - DNA, 21 bp, Artificial Sequence
  Description of Artificial Sequence: Synthetic oligonucleotide
agcgtcatggcaaaccaagca

SEQ ID NO: 39861 - DNA, 21 bp, Artificial Sequence
  Description of Artificial Sequence: Synthetic oligonucleotide
agcgtcatgccaaaaccacaa

SEQ ID NO: 39862 - DNA, 21 bp, Artificial Sequence
  Description of Artificial Sequence: Synthetic oligonucleotide
agcgtcaacgcaacaagagga

SEQ ID NO: 39863 - DNA, 21 bp, Artificial Sequence
  Description of Artificial Sequence: Synthetic oligonucleotide
agcgtcaacggaaacgacgtc

SEQ ID NO: 39864 - DNA, 21 bp, Artificial Sequence
  Description of Artificial Sequence: Synthetic oligonucleotide
agcgtcaacggaagctggaaa

SEQ ID NO: 39865 - DNA, 21 bp, Artificial Sequence
  Description of Artificial Sequence: Synthetic oligonucleotide
agcgtcccagaatacaacgga

SEQ ID NO: 39866 - DNA, 21 bp, Artificial Sequence
  Description of Artificial Sequence: Synthetic oligonucleotide
agcgtcccaggaacaggaagc

SEQ ID NO: 39867 - DNA, 21 bp, Artificial Sequence
  Description of Artificial Sequence: Synthetic oligonucleotide
agcgtcccacacacaagcaca

SEQ ID NO: 39868 - DNA, 21 bp, Artificial Sequence
  Description of Artificial Sequence: Synthetic oligonucleotide
agcgtcccacaaatgtacagc

SEQ ID NO: 39869 - DNA, 21 bp, Artificial Sequence
  Description of Artificial Sequence: Synthetic oligonucleotide
agcgtcccaagcgcaagcaaa

SEQ ID NO: 39870 - DNA, 21 bp, Artificial Sequence
  Description of Artificial Sequence: Synthetic oligonucleotide
agcgtcccaagcagcacaaga

SEQ ID NO: 39871 - DNA, 21 bp, Artificial Sequence
  Description of Artificial Sequence: Synthetic oligonucleotide
agcgtcccagtcacaccagga

SEQ ID NO: 39872 - DNA, 21 bp, Artificial Sequence
  Description of Artificial Sequence: Synthetic oligonucleotide
agcgtcccatacgtcggaaca

SEQ ID NO: 39873 - DNA, 21 bp, Artificial Sequence
  Description of Artificial Sequence: Synthetic oligonucleotide
agcgtccaaagagaagaaaga

SEQ ID NO: 39874 - DNA, 21 bp, Artificial Sequence
  Description of Artificial Sequence: Synthetic oligonucleotide
agcgtccaaagaggagtcgac

SEQ ID NO: 39875 - DNA, 21 bp, Artificial Sequence
  Description of Artificial Sequence: Synthetic oligonucleotide
agcgtccaaacaagaccagaa

SEQ ID NO: 39876 - DNA, 21 bp, Artificial Sequence
  Description of Artificial Sequence: Synthetic oligonucleotide
agcgtccaagtcggataccac

SEQ ID NO: 39877 - DNA, 21 bp, Artificial Sequence
  Description of Artificial Sequence: Synthetic oligonucleotide
agcgtcagagcagaaagcgca

SEQ ID NO: 39878 - DNA, 21 bp, Artificial Sequence
  Description of Artificial Sequence: Synthetic oligonucleotide
agcgtcagacacgtcgaacca

SEQ ID NO: 39879 - DNA, 21 bp, Artificial Sequence
  Description of Artificial Sequence: Synthetic oligonucleotide
agcgtcagaagcgcaagccaa

SEQ ID NO: 39880 - DNA, 21 bp, Artificial Sequence
  Description of Artificial Sequence: Synthetic oligonucleotide
agcgtcagaagcctcagccca

SEQ ID NO: 39881 - DNA, 21 bp, Artificial Sequence
  Description of Artificial Sequence: Synthetic oligonucleotide
agcgtcagaagcaaccacgca

SEQ ID NO: 39882 - DNA, 21 bp, Artificial Sequence
  Description of Artificial Sequence: Synthetic oligonucleotide
agcgtcagaacaaaagacagc

SEQ ID NO: 39883 - DNA, 21 bp, Artificial Sequence
  Description of Artificial Sequence: Synthetic oligonucleotide
agcgtcagcttcagcagcagc

SEQ ID NO: 39884 - DNA, 21 bp, Artificial Sequence
  Description of Artificial Sequence: Synthetic oligonucleotide
agcgtcagcggagcagcagca

SEQ ID NO: 39885 - DNA, 21 bp, Artificial Sequence
  Description of Artificial Sequence: Synthetic oligonucleotide
agcgtcagccacaacgcacca

SEQ ID NO: 39886 - DNA, 21 bp, Artificial Sequence
  Description of Artificial Sequence: Synthetic oligonucleotide
agcgtcagcaaagaaggaaca

SEQ ID NO: 39887 - DNA, 21 bp, Artificial Sequence
  Description of Artificial Sequence: Synthetic oligonucleotide
agcgtcagcctcgcagaccca

SEQ ID NO: 39888 - DNA, 21 bp, Artificial Sequence
  Description of Artificial Sequence: Synthetic oligonucleotide
agcgtcagcctcgaactctac

SEQ ID NO: 39889 - DNA, 21 bp, Artificial Sequence
  Description of Artificial Sequence: Synthetic oligonucleotide
agcgtcagcctcggaccaaaa

SEQ ID NO: 39890 - DNA, 21 bp, Artificial Sequence
  Description of Artificial Sequence: Synthetic oligonucleotide
agcgtcagcccacaccaagca

SEQ ID NO: 39891 - DNA, 21 bp, Artificial Sequence
  Description of Artificial Sequence: Synthetic oligonucleotide
agcgtcagcagaatggtcgca

SEQ ID NO: 39892 - DNA, 21 bp, Artificial Sequence
  Description of Artificial Sequence: Synthetic oligonucleotide
agcgtcagcagaccagcactc

SEQ ID NO: 39893 - DNA, 21 bp, Artificial Sequence
  Description of Artificial Sequence: Synthetic oligonucleotide
agcgtcagcagacaacaaatc

SEQ ID NO: 39894 - DNA, 21 bp, Artificial Sequence
  Description of Artificial Sequence: Synthetic oligonucleotide
agcgtcagcagccaaaacaca

SEQ ID NO: 39895 - DNA, 21 bp, Artificial Sequence
  Description of Artificial Sequence: Synthetic oligonucleotide
agcgtcagcagcagccaactc

SEQ ID NO: 39896 - DNA, 21 bp, Artificial Sequence
  Description of Artificial Sequence: Synthetic oligonucleotide
agcgtcagcacagcaaaccca

SEQ ID NO: 39897 - DNA, 21 bp, Artificial Sequence
  Description of Artificial Sequence: Synthetic oligonucleotide
agcgtcagcacactcccaatg

SEQ ID NO: 39898 - DNA, 21 bp, Artificial Sequence
  Description of Artificial Sequence: Synthetic oligonucleotide
agcgtcagcacaaacaaatac

SEQ ID NO: 39899 - DNA, 21 bp, Artificial Sequence
  Description of Artificial Sequence: Synthetic oligonucleotide
agcgtcagcgtcgactacatg

SEQ ID NO: 39900 - DNA, 21 bp, Artificial Sequence
  Description of Artificial Sequence: Synthetic oligonucleotide
agcgtcacagcaaaaacatac

SEQ ID NO: 39901 - DNA, 21 bp, Artificial Sequence
  Description of Artificial Sequence: Synthetic oligonucleotide
agcgtcacagacggagtcctc

SEQ ID NO: 39902 - DNA, 21 bp, Artificial Sequence
  Description of Artificial Sequence: Synthetic oligonucleotide
agcgtcacagaacacgtcatc

SEQ ID NO: 39903 - DNA, 21 bp, Artificial Sequence
  Description of Artificial Sequence: Synthetic oligonucleotide
agcgtcacaggagcaaacaca

SEQ ID NO: 39904 - DNA, 21 bp, Artificial Sequence
  Description of Artificial Sequence: Synthetic oligonucleotide
agcgtcacacacctcttcaaa

SEQ ID NO: 39905 - DNA, 21 bp, Artificial Sequence
  Description of Artificial Sequence: Synthetic oligonucleotide
agcgtcacaccaacaagagca

SEQ ID NO: 39906 - DNA, 21 bp, Artificial Sequence
  Description of Artificial Sequence: Synthetic oligonucleotide
agcgtcacacaaatgttcaaa

SEQ ID NO: 39907 - DNA, 21 bp, Artificial Sequence
  Description of Artificial Sequence: Synthetic oligonucleotide
agcgtcacaagagcaccatac

SEQ ID NO: 39908 - DNA, 21 bp, Artificial Sequence
  Description of Artificial Sequence: Synthetic oligonucleotide
agcgtcacaacaagagcaatc

SEQ ID NO: 39909 - DNA, 21 bp, Artificial Sequence
  Description of Artificial Sequence: Synthetic oligonucleotide
agcgtcgtcgcagcagtcatc

SEQ ID NO: 39910 - DNA, 21 bp, Artificial Sequence
  Description of Artificial Sequence: Synthetic oligonucleotide
agcgtcgtcggaacacacgca

SEQ ID NO: 39911 - DNA, 21 bp, Artificial Sequence
  Description of Artificial Sequence: Synthetic oligonucleotide
agcgtcgtcccacacgacctc

SEQ ID NO: 39912 - DNA, 21 bp, Artificial Sequence
  Description of Artificial Sequence: Synthetic oligonucleotide
agcgtcgtcagaaaagaagca

SEQ ID NO: 39913 - DNA, 21 bp, Artificial Sequence
  Description of Artificial Sequence: Synthetic oligonucleotide
agcgtcgtcagcagactcgga

SEQ ID NO: 39914 - DNA, 21 bp, Artificial Sequence
  Description of Artificial Sequence: Synthetic oligonucleotide
agcgtcgtcagcagccaagga

SEQ ID NO: 39915 - DNA, 21 bp, Artificial Sequence
  Description of Artificial Sequence: Synthetic oligonucleotide
agcgtctacacacaagcacca

SEQ ID NO: 39916 - DNA, 21 bp, Artificial Sequence
  Description of Artificial Sequence: Synthetic oligonucleotide
agctgggacgcaagcgcactc

SEQ ID NO: 39917 - DNA, 21 bp, Artificial Sequence
  Description of Artificial Sequence: Synthetic oligonucleotide
agctggggagcaaaagaagga

SEQ ID NO: 39918 - DNA, 21 bp, Artificial Sequence
  Description of Artificial Sequence: Synthetic oligonucleotide
agctggggagaaacagcaaaa

SEQ ID NO: 39919 - DNA, 21 bp, Artificial Sequence
  Description of Artificial Sequence: Synthetic oligonucleotide
agctggcacaacagccaacca

SEQ ID NO: 39920 - DNA, 21 bp, Artificial Sequence
  Description of Artificial Sequence: Synthetic oligonucleotide
agctggccaagcaacggagtc

SEQ ID NO: 39921 - DNA, 21 bp, Artificial Sequence
  Description of Artificial Sequence: Synthetic oligonucleotide
agctggcaaacaagcatcgca

SEQ ID NO: 39922 - DNA, 21 bp, Artificial Sequence
  Description of Artificial Sequence: Synthetic oligonucleotide
agctggagagacgtcccacca

SEQ ID NO: 39923 - DNA, 21 bp, Artificial Sequence
  Description of Artificial Sequence: Synthetic oligonucleotide
agctggagccacgaacaagaa

SEQ ID NO: 39924 - DNA, 21 bp, Artificial Sequence
  Description of Artificial Sequence: Synthetic oligonucleotide
agctacgcaaaaagcctcgac

SEQ ID NO: 39925 - DNA, 21 bp, Artificial Sequence
  Description of Artificial Sequence: Synthetic oligonucleotide
agctacgcaagaacaagcctc

SEQ ID NO: 39926 - DNA, 21 bp, Artificial Sequence
  Description of Artificial Sequence: Synthetic oligonucleotide
agctacgcaagcctcacacca

SEQ ID NO: 39927 - DNA, 21 bp, Artificial Sequence
  Description of Artificial Sequence: Synthetic oligonucleotide
agctacgcaagcagaacagtc

SEQ ID NO: 39928 - DNA, 21 bp, Artificial Sequence
  Description of Artificial Sequence: Synthetic oligonucleotide
agctacgcaacaagcctcaca

SEQ ID NO: 39929 - DNA, 21 bp, Artificial Sequence
  Description of Artificial Sequence: Synthetic oligonucleotide
agctacgacagaagcccagca

SEQ ID NO: 39930 - DNA, 21 bp, Artificial Sequence
  Description of Artificial Sequence: Synthetic oligonucleotide
agctacgaagcaagcaaatac

SEQ ID NO: 39931 - DNA, 21 bp, Artificial Sequence
  Description of Artificial Sequence: Synthetic oligonucleotide
agctacgaagacgacagctgc

SEQ ID NO: 39932 - DNA, 21 bp, Artificial Sequence
  Description of Artificial Sequence: Synthetic oligonucleotide
agctacgaaccaaacaaactc

SEQ ID NO: 39933 - DNA, 21 bp, Artificial Sequence
  Description of Artificial Sequence: Synthetic oligonucleotide
agctacggaggaacactcctc

SEQ ID NO: 39934 - DNA, 21 bp, Artificial Sequence
  Description of Artificial Sequence: Synthetic oligonucleotide
agctacggaaaagaatacgtc

SEQ ID NO: 39935 - DNA, 21 bp, Artificial Sequence
  Description of Artificial Sequence: Synthetic oligonucleotide
agctacggactcccagcatac

SEQ ID NO: 39936 - DNA, 21 bp, Artificial Sequence
  Description of Artificial Sequence: Synthetic oligonucleotide
agctacggaccaatcaaaaca

SEQ ID NO: 39937 - DNA, 21 bp, Artificial Sequence
  Description of Artificial Sequence: Synthetic oligonucleotide
agctacggaagaggagcagaa

SEQ ID NO: 39938 - DNA, 21 bp, Artificial Sequence
  Description of Artificial Sequence: Synthetic oligonucleotide
agctacggaagcggacaaatc

SEQ ID NO: 39939 - DNA, 21 bp, Artificial Sequence
  Description of Artificial Sequence: Synthetic oligonucleotide
agctacggaagcaaactccca

SEQ ID NO: 39940 - DNA, 21 bp, Artificial Sequence
  Description of Artificial Sequence: Synthetic oligonucleotide
agctacggaacagcaccaatc

SEQ ID NO: 39941 - DNA, 21 bp, Artificial Sequence
  Description of Artificial Sequence: Synthetic oligonucleotide
agctacggagtcccaagacca

SEQ ID NO: 39942 - DNA, 21 bp, Artificial Sequence
  Description of Artificial Sequence: Synthetic oligonucleotide
agctaccacccaaaactcaac

SEQ ID NO: 39943 - DNA, 21 bp, Artificial Sequence
  Description of Artificial Sequence: Synthetic oligonucleotide
agctacatcccaagcacaatc

SEQ ID NO: 39944 - DNA, 21 bp, Artificial Sequence
  Description of Artificial Sequence: Synthetic oligonucleotide
agctacatcagagaagaccca

SEQ ID NO: 39945 - DNA, 21 bp, Artificial Sequence
  Description of Artificial Sequence: Synthetic oligonucleotide
agctacaaaggaagctacatg

SEQ ID NO: 39946 - DNA, 21 bp, Artificial Sequence
  Description of Artificial Sequence: Synthetic oligonucleotide
agctacaaacacatgccacca

SEQ ID NO: 39947 - DNA, 21 bp, Artificial Sequence
  Description of Artificial Sequence: Synthetic oligonucleotide
agctacaaaagccaaatcgca

SEQ ID NO: 39948 - DNA, 21 bp, Artificial Sequence
  Description of Artificial Sequence: Synthetic oligonucleotide
agctacctcggaatcgcacca

SEQ ID NO: 39949 - DNA, 21 bp, Artificial Sequence
  Description of Artificial Sequence: Synthetic oligonucleotide
agctacctcaacccaatgaac

SEQ ID NO: 39950 - DNA, 21 bp, Artificial Sequence
  Description of Artificial Sequence: Synthetic oligonucleotide
agctacctcccaccagcacca

SEQ ID NO: 39951 - DNA, 21 bp, Artificial Sequence
  Description of Artificial Sequence: Synthetic oligonucleotide
agctacatggcaagcctccca

SEQ ID NO: 39952 - DNA, 21 bp, Artificial Sequence
  Description of Artificial Sequence: Synthetic oligonucleotide
agctacatgccacaaacagtc

SEQ ID NO: 39953 - DNA, 21 bp, Artificial Sequence
  Description of Artificial Sequence: Synthetic oligonucleotide
agctacatgagcccagtcagc

SEQ ID NO: 39954 - DNA, 21 bp, Artificial Sequence
  Description of Artificial Sequence: Synthetic oligonucleotide
agctacatgacaaaagacctc

SEQ ID NO: 39955 - DNA, 21 bp, Artificial Sequence
  Description of Artificial Sequence: Synthetic oligonucleotide
agctacccagcaaaaccaagc

SEQ ID NO: 39956 - DNA, 21 bp, Artificial Sequence
  Description of Artificial Sequence: Synthetic oligonucleotide
agctacccagcaagcagcaga

SEQ ID NO: 39957 - DNA, 21 bp, Artificial Sequence
  Description of Artificial Sequence: Synthetic oligonucleotide
agctacccaaaaagctacgaa

SEQ ID NO: 39958 - DNA, 21 bp, Artificial Sequence
  Description of Artificial Sequence: Synthetic oligonucleotide
agctacccagtcagcgtccca

SEQ ID NO: 39959 - DNA, 21 bp, Artificial Sequence
  Description of Artificial Sequence: Synthetic oligonucleotide
agctaccaagcaatcagcaca

SEQ ID NO: 39960 - DNA, 21 bp, Artificial Sequence
  Description of Artificial Sequence: Synthetic oligonucleotide
agctacagaccagaaagcgga

SEQ ID NO: 39961 - DNA, 21 bp, Artificial Sequence
  Description of Artificial Sequence: Synthetic oligonucleotide
agctacagaccagaaacaaac

SEQ ID NO: 39962 - DNA, 21 bp, Artificial Sequence
  Description of Artificial Sequence: Synthetic oligonucleotide
agctacagagtcaacacagga

SEQ ID NO: 39963 - DNA, 21 bp, Artificial Sequence
  Description of Artificial Sequence: Synthetic oligonucleotide
agctacagcgcaagcgaattc

SEQ ID NO: 39964 - DNA, 21 bp, Artificial Sequence
  Description of Artificial Sequence: Synthetic oligonucleotide
agctacagcgcaacaacagtc

SEQ ID NO: 39965 - DNA, 21 bp, Artificial Sequence
  Description of Artificial Sequence: Synthetic oligonucleotide
agctacagcggaggatgcctc

SEQ ID NO: 39966 - DNA, 21 bp, Artificial Sequence
  Description of Artificial Sequence: Synthetic oligonucleotide
agctacagccacctcagcgga

SEQ ID NO: 39967 - DNA, 21 bp, Artificial Sequence
  Description of Artificial Sequence: Synthetic oligonucleotide
agctacagcatggcacaccca

SEQ ID NO: 39968 - DNA, 21 bp, Artificial Sequence
  Description of Artificial Sequence: Synthetic oligonucleotide
agctacagcagcgacagaagc

SEQ ID NO: 39969 - DNA, 21 bp, Artificial Sequence
  Description of Artificial Sequence: Synthetic oligonucleotide
agctacacagacgcagcactc

SEQ ID NO: 39970 - DNA, 21 bp, Artificial Sequence
  Description of Artificial Sequence: Synthetic oligonucleotide
agctacacacacgtcagcgga

SEQ ID NO: 39971 - DNA, 21 bp, Artificial Sequence
  Description of Artificial Sequence: Synthetic oligonucleotide
agctacacaaaagacgtcgac

SEQ ID NO: 39972 - DNA, 21 bp, Artificial Sequence
  Description of Artificial Sequence: Synthetic oligonucleotide
agctacacaaaaagcgcacca

SEQ ID NO: 39973 - DNA, 21 bp, Artificial Sequence
  Description of Artificial Sequence: Synthetic oligonucleotide
agctacacaagcccaagcagc

SEQ ID NO: 39974 - DNA, 21 bp, Artificial Sequence
  Description of Artificial Sequence: Synthetic oligonucleotide
agctacacagtcgacagccac

SEQ ID NO: 39975 - DNA, 21 bp, Artificial Sequence
  Description of Artificial Sequence: Synthetic oligonucleotide
agctacgtcaaaccagcagaa

SEQ ID NO: 39976 - DNA, 21 bp, Artificial Sequence
  Description of Artificial Sequence: Synthetic oligonucleotide
agctacgtcaacaacccagga

SEQ ID NO: 39977 - DNA, 21 bp, Artificial Sequence
  Description of Artificial Sequence: Synthetic oligonucleotide
agctacgtcagaccaacaagc

SEQ ID NO: 39978 - DNA, 21 bp, Artificial Sequence
  Description of Artificial Sequence: Synthetic oligonucleotide
agctacgtcagcggagcagca

SEQ ID NO: 39979 - DNA, 21 bp, Artificial Sequence
  Description of Artificial Sequence: Synthetic oligonucleotide
acagcagcagcagacagagtc

SEQ ID NO: 39980 - DNA, 21 bp, Artificial Sequence
  Description of Artificial Sequence: Synthetic oligonucleotide
acagcagcagcaagcaacaga

SEQ ID NO: 39981 - DNA, 21 bp, Artificial Sequence
  Description of Artificial Sequence: Synthetic oligonucleotide
acagcagcagcaagcgtcaga

SEQ ID NO: 39982 - DNA, 21 bp, Artificial Sequence
  Description of Artificial Sequence: Synthetic oligonucleotide
acagcagcagacaacgacgaa

SEQ ID NO: 39983 - DNA, 21 bp, Artificial Sequence
  Description of Artificial Sequence: Synthetic oligonucleotide
acagcagcattcgacagagtc

SEQ ID NO: 39984 - DNA, 21 bp, Artificial Sequence
  Description of Artificial Sequence: Synthetic oligonucleotide
acagcagcacacctcggaaac

SEQ ID NO: 39985 - DNA, 21 bp, Artificial Sequence
  Description of Artificial Sequence: Synthetic oligonucleotide
acagcagcaaaaagcgcagga

SEQ ID NO: 39986 - DNA, 21 bp, Artificial Sequence
  Description of Artificial Sequence: Synthetic oligonucleotide
acagcagcactcacaggacac

SEQ ID NO: 39987 - DNA, 21 bp, Artificial Sequence
  Description of Artificial Sequence: Synthetic oligonucleotide
acagcagcaagattcgcagca

SEQ ID NO: 39988 - DNA, 21 bp, Artificial Sequence
  Description of Artificial Sequence: Synthetic oligonucleotide
acagcagcaagaagcagcgac

SEQ ID NO: 39989 - DNA, 21 bp, Artificial Sequence
  Description of Artificial Sequence: Synthetic oligonucleotide
acagcagcaagccacagcaca

SEQ ID NO: 39990 - DNA, 21 bp, Artificial Sequence
  Description of Artificial Sequence: Synthetic oligonucleotide
acagcagcaacaaacgtcaac

SEQ ID NO: 39991 - DNA, 21 bp, Artificial Sequence
  Description of Artificial Sequence: Synthetic oligonucleotide
acagcagcagtcacaaacaca

SEQ ID NO: 39992 - DNA, 21 bp, Artificial Sequence
  Description of Artificial Sequence: Synthetic oligonucleotide
acagcagacagaatgatgagc

SEQ ID NO: 39993 - DNA, 21 bp, Artificial Sequence
  Description of Artificial Sequence: Synthetic oligonucleotide
acagcagaacacacaagattc

SEQ ID NO: 39994 - DNA, 21 bp, Artificial Sequence
  Description of Artificial Sequence: Synthetic oligonucleotide
acagcagaaaacctcagccca

SEQ ID NO: 39995 - DNA, 21 bp, Artificial Sequence
  Description of Artificial Sequence: Synthetic oligonucleotide
acagcagaaccagtcagaaca

SEQ ID NO: 39996 - DNA, 21 bp, Artificial Sequence
  Description of Artificial Sequence: Synthetic oligonucleotide
acagcattccaaacaatcgaa

SEQ ID NO: 39997 - DNA, 21 bp, Artificial Sequence
  Description of Artificial Sequence: Synthetic oligonucleotide
acagcattcagaatggactac

SEQ ID NO: 39998 - DNA, 21 bp, Artificial Sequence
  Description of Artificial Sequence: Synthetic oligonucleotide
acagcaggaggacaaccactc

SEQ ID NO: 39999 - DNA, 21 bp, Artificial Sequence
  Description of Artificial Sequence: Synthetic oligonucleotide
acagcaggaggaacaacacca

SEQ ID NO: 40000 - DNA, 21 bp, Artificial Sequence
  Description of Artificial Sequence: Synthetic oligonucleotide
acagcaggactcggagtccca

SEQ ID NO: 40001 - DNA, 21 bp, Artificial Sequence
  Description of Artificial Sequence: Synthetic oligonucleotide
acagcaggaaacctcatccca

SEQ ID NO: 40002 - DNA, 21 bp, Artificial Sequence
  Description of Artificial Sequence: Synthetic oligonucleotide
acagcaggaccacacagagtc

SEQ ID NO: 40003 - DNA, 21 bp, Artificial Sequence
  Description of Artificial Sequence: Synthetic oligonucleotide
acagcaggagtcccagcaatc

SEQ ID NO: 40004 - DNA, 21 bp, Artificial Sequence
  Description of Artificial Sequence: Synthetic oligonucleotide
acagcacacgaagaaagaaac

SEQ ID NO: 40005 - DNA, 21 bp, Artificial Sequence
  Description of Artificial Sequence: Synthetic oligonucleotide
acagcacacttcagcgcaaca

SEQ ID NO: 40006 - DNA, 21 bp, Artificial Sequence
  Description of Artificial Sequence: Synthetic oligonucleotide
acagcacacccattcccacca

SEQ ID NO: 40007 - DNA, 21 bp, Artificial Sequence
  Description of Artificial Sequence: Synthetic oligonucleotide
acagcacaccaactcatcgca

SEQ ID NO: 40008 - DNA, 21 bp, Artificial Sequence
  Description of Artificial Sequence: Synthetic oligonucleotide
acagcacacagcctccaaagc

SEQ ID NO: 40009 - DNA, 21 bp, Artificial Sequence
  Description of Artificial Sequence: Synthetic oligonucleotide
acagcacacagctacgcacac

SEQ ID NO: 40010 - DNA, 21 bp, Artificial Sequence
  Description of Artificial Sequence: Synthetic oligonucleotide
acagcacacgtcttcccagca

SEQ ID NO: 40011 - DNA, 21 bp, Artificial Sequence
  Description of Artificial Sequence: Synthetic oligonucleotide
acagcaatcggaatcagccca

SEQ ID NO: 40012 - DNA, 21 bp, Artificial Sequence
  Description of Artificial Sequence: Synthetic oligonucleotide
acagcaatcccattcccagca

SEQ ID NO: 40013 - DNA, 21 bp, Artificial Sequence
  Description of Artificial Sequence: Synthetic oligonucleotide
acagcaatcagcagcagagca

SEQ ID NO: 40014 - DNA, 21 bp, Artificial Sequence
  Description of Artificial Sequence: Synthetic oligonucleotide
acagcaaaagcaacagtcgaa

SEQ ID NO: 40015 - DNA, 21 bp, Artificial Sequence
  Description of Artificial Sequence: Synthetic oligonucleotide
acagcaaaaagcagcaacaac

SEQ ID NO: 40016 - DNA, 21 bp, Artificial Sequence
  Description of Artificial Sequence: Synthetic oligonucleotide
acagcaaaaacaagcgcaatc

SEQ ID NO: 40017 - DNA, 21 bp, Artificial Sequence
  Description of Artificial Sequence: Synthetic oligonucleotide
acagcaaaatacgaccacctc

SEQ ID NO: 40018 - DNA, 21 bp, Artificial Sequence
  Description of Artificial Sequence: Synthetic oligonucleotide
acagcactcttccaagacgca

SEQ ID NO: 40019 - DNA, 21 bp, Artificial Sequence
  Description of Artificial Sequence: Synthetic oligonucleotide
acagcactccacgcagacgtc

SEQ ID NO: 40020 - DNA, 21 bp, Artificial Sequence
  Description of Artificial Sequence: Synthetic oligonucleotide
acagcactccactacagcgaa

SEQ ID NO: 40021 - DNA, 21 bp, Artificial Sequence
  Description of Artificial Sequence: Synthetic oligonucleotide
acagcaatgccaatgaaaatc

SEQ ID NO: 40022 - DNA, 21 bp, Artificial Sequence
  Description of Artificial Sequence: Synthetic oligonucleotide
acagcaatgcaaatgacacca

SEQ ID NO: 40023 - DNA, 21 bp, Artificial Sequence
  Description of Artificial Sequence: Synthetic oligonucleotide
acagcaatgcaaacagcaatg

SEQ ID NO: 40024 - DNA, 21 bp, Artificial Sequence
  Description of Artificial Sequence: Synthetic oligonucleotide
acagcaatgacaacaatggga

SEQ ID NO: 40025 - DNA, 21 bp, Artificial Sequence
  Description of Artificial Sequence: Synthetic oligonucleotide
acagcaaacccactcagcaca

SEQ ID NO: 40026 - DNA, 21 bp, Artificial Sequence
  Description of Artificial Sequence: Synthetic oligonucleotide
acagcaaacgtcccagcaaga

SEQ ID NO: 40027 - DNA, 21 bp, Artificial Sequence
  Description of Artificial Sequence: Synthetic oligonucleotide
acagcaaacgtcagaagcatg

SEQ ID NO: 40028 - DNA, 21 bp, Artificial Sequence
  Description of Artificial Sequence: Synthetic oligonucleotide
acagcaccagaaagaacaaac

SEQ ID NO: 40029 - DNA, 21 bp, Artificial Sequence
  Description of Artificial Sequence: Synthetic oligonucleotide
acagcaccaggacacgcaagc

SEQ ID NO: 40030 - DNA, 21 bp, Artificial Sequence
  Description of Artificial Sequence: Synthetic oligonucleotide
acagcaccaccaacagacaga

SEQ ID NO: 40031 - DNA, 21 bp, Artificial Sequence
  Description of Artificial Sequence: Synthetic oligonucleotide
acagcaccaagaagcagcgaa

SEQ ID NO: 40032 - DNA, 21 bp, Artificial Sequence
  Description of Artificial Sequence: Synthetic oligonucleotide
acagcaccaagcagaatggga

SEQ ID NO: 40033 - DNA, 21 bp, Artificial Sequence
  Description of Artificial Sequence: Synthetic oligonucleotide
acagcaccaacaggaacaatc

SEQ ID NO: 40034 - DNA, 21 bp, Artificial Sequence
  Description of Artificial Sequence: Synthetic oligonucleotide
acagcaccatacggagacgca

SEQ ID NO: 40035 - DNA, 21 bp, Artificial Sequence
  Description of Artificial Sequence: Synthetic oligonucleotide
acagcacaagaaggaagaaca

SEQ ID NO: 40036 - DNA, 21 bp, Artificial Sequence
  Description of Artificial Sequence: Synthetic oligonucleotide
acagcacaactcacagcacac

SEQ ID NO: 40037 - DNA, 21 bp, Artificial Sequence
  Description of Artificial Sequence: Synthetic oligonucleotide
acagcacaactcacaagcagc

SEQ ID NO: 40038 - DNA, 21 bp, Artificial Sequence
  Description of Artificial Sequence: Synthetic oligonucleotide
acagcacaaagaggaccagca

SEQ ID NO: 40039 - DNA, 21 bp, Artificial Sequence
  Description of Artificial Sequence: Synthetic oligonucleotide
acagcaagagacagcagccca

SEQ ID NO: 40040 - DNA, 21 bp, Artificial Sequence
  Description of Artificial Sequence: Synthetic oligonucleotide
acagcaagaggactcgtccca

SEQ ID NO: 40041 - DNA, 21 bp, Artificial Sequence
  Description of Artificial Sequence: Synthetic oligonucleotide
acagcaagaggaaacatgctc

SEQ ID NO: 40042 - DNA, 21 bp, Artificial Sequence
  Description of Artificial Sequence: Synthetic oligonucleotide
acagcaagaggaagcccactc

SEQ ID NO: 40043 - DNA, 21 bp, Artificial Sequence
  Description of Artificial Sequence: Synthetic oligonucleotide
acagcaagaccaccaggagtc

SEQ ID NO: 40044 - DNA, 21 bp, Artificial Sequence
  Description of Artificial Sequence: Synthetic oligonucleotide
acagcaagaagcagcgtcaca

SEQ ID NO: 40045 - DNA, 21 bp, Artificial Sequence
  Description of Artificial Sequence: Synthetic oligonucleotide
acagcaagaacactcatcagc

SEQ ID NO: 40046 - DNA, 21 bp, Artificial Sequence
  Description of Artificial Sequence: Synthetic oligonucleotide
acagcaagcgcagcaagaaca

SEQ ID NO: 40047 - DNA, 21 bp, Artificial Sequence
  Description of Artificial Sequence: Synthetic oligonucleotide
acagcaagcgcaacataccca

SEQ ID NO: 40048 - DNA, 21 bp, Artificial Sequence
  Description of Artificial Sequence: Synthetic oligonucleotide
acagcaagcttcagcagcaca

SEQ ID NO: 40049 - DNA, 21 bp, Artificial Sequence
  Description of Artificial Sequence: Synthetic oligonucleotide
acagcaagcggaagcgaaaga

SEQ ID NO: 40050 - DNA, 21 bp, Artificial Sequence
  Description of Artificial Sequence: Synthetic oligonucleotide
acagcaagcaaaaacgactac

SEQ ID NO: 40051 - DNA, 21 bp, Artificial Sequence
  Description of Artificial Sequence: Synthetic oligonucleotide
acagcaagcatgggagaaaga

SEQ ID NO: 40052 - DNA, 21 bp, Artificial Sequence
  Description of Artificial Sequence: Synthetic oligonucleotide
acagcaagcagcatgggaaaa

SEQ ID NO: 40053 - DNA, 21 bp, Artificial Sequence
  Description of Artificial Sequence: Synthetic oligonucleotide
acagcaagcacagtcaaaatg

SEQ ID NO: 40054 - DNA, 21 bp, Artificial Sequence
  Description of Artificial Sequence: Synthetic oligonucleotide
acagcaagcgtcccaatgaaa

SEQ ID NO: 40055 - DNA, 21 bp, Artificial Sequence
  Description of Artificial Sequence: Synthetic oligonucleotide
acagcaagctacagcccaaaa

SEQ ID NO: 40056 - DNA, 21 bp, Artificial Sequence
  Description of Artificial Sequence: Synthetic oligonucleotide
acagcaacaccacacatcgga

SEQ ID NO: 40057 - DNA, 21 bp, Artificial Sequence
  Description of Artificial Sequence: Synthetic oligonucleotide
acagcaacaagaaacgaagtc

SEQ ID NO: 40058 - DNA, 21 bp, Artificial Sequence
  Description of Artificial Sequence: Synthetic oligonucleotide
acagcaacaagaacaggacca

SEQ ID NO: 40059 - DNA, 21 bp, Artificial Sequence
  Description of Artificial Sequence: Synthetic oligonucleotide
acagcaacatacccaaacgac

SEQ ID NO: 40060 - DNA, 21 bp, Artificial Sequence
  Description of Artificial Sequence: Synthetic oligonucleotide
acagcagtcgcacacccagca

SEQ ID NO: 40061 - DNA, 21 bp, Artificial Sequence
  Description of Artificial Sequence: Synthetic oligonucleotide
acagcagtcccagaatggaca

SEQ ID NO: 40062 - DNA, 21 bp, Artificial Sequence
  Description of Artificial Sequence: Synthetic oligonucleotide
acagcagtccaagaacacaca

SEQ ID NO: 40063 - DNA, 21 bp, Artificial Sequence
  Description of Artificial Sequence: Synthetic oligonucleotide
acagcagtcagaagcatcagc

SEQ ID NO: 40064 - DNA, 21 bp, Artificial Sequence
  Description of Artificial Sequence: Synthetic oligonucleotide
acagcagtcgtcaaattccca

SEQ ID NO: 40065 - DNA, 21 bp, Artificial Sequence
  Description of Artificial Sequence: Synthetic oligonucleotide
acagcagtctacgcaacagca

SEQ ID NO: 40066 - DNA, 21 bp, Artificial Sequence
  Description of Artificial Sequence: Synthetic oligonucleotide
acagcagtctacagcaaagga

SEQ ID NO: 40067 - DNA, 21 bp, Artificial Sequence
  Description of Artificial Sequence: Synthetic oligonucleotide
acagcatgggacccagaaagc

SEQ ID NO: 40068 - DNA, 21 bp, Artificial Sequence
  Description of Artificial Sequence: Synthetic oligonucleotide
acagcatactgccaacaatac

SEQ ID NO: 40069 - DNA, 21 bp, Artificial Sequence
  Description of Artificial Sequence: Synthetic oligonucleotide
acagcatacccattcgaagca

SEQ ID NO: 40070 - DNA, 21 bp, Artificial Sequence
  Description of Artificial Sequence: Synthetic oligonucleotide
acagcatacccacaccaaatc

SEQ ID NO: 40071 - DNA, 21 bp, Artificial Sequence
  Description of Artificial Sequence: Synthetic oligonucleotide
acagacgcagacagaagccca

SEQ ID NO: 40072 - DNA, 21 bp, Artificial Sequence
  Description of Artificial Sequence: Synthetic oligonucleotide
acagactgcagacaaggagga

SEQ ID NO: 40073 - DNA, 21 bp, Artificial Sequence
  Description of Artificial Sequence: Synthetic oligonucleotide
acagacgacatcaaaaacgac

SEQ ID NO: 40074 - DNA, 21 bp, Artificial Sequence
  Description of Artificial Sequence: Synthetic oligonucleotide
acagacgaatacaaaaaagca

SEQ ID NO: 40075 - DNA, 21 bp, Artificial Sequence
  Description of Artificial Sequence: Synthetic oligonucleotide
acagacttcagaagaatccca

SEQ ID NO: 40076 - DNA, 21 bp, Artificial Sequence
  Description of Artificial Sequence: Synthetic oligonucleotide
acagacggactccacaaactc

SEQ ID NO: 40077 - DNA, 21 bp, Artificial Sequence
  Description of Artificial Sequence: Synthetic oligonucleotide
acagacggaccaggactcaca

SEQ ID NO: 40078 - DNA, 21 bp, Artificial Sequence
  Description of Artificial Sequence: Synthetic oligonucleotide
acagacggaagactcggagga

SEQ ID NO: 40079 - DNA, 21 bp, Artificial Sequence
  Description of Artificial Sequence: Synthetic oligonucleotide
acagacggaagcagagtccca

SEQ ID NO: 40080 - DNA, 21 bp, Artificial Sequence
  Description of Artificial Sequence: Synthetic oligonucleotide
acagaccacgtccacagagga

SEQ ID NO: 40081 - DNA, 21 bp, Artificial Sequence
  Description of Artificial Sequence: Synthetic oligonucleotide
acagacaaacacggagtcctc

SEQ ID NO: 40082 - DNA, 21 bp, Artificial Sequence
  Description of Artificial Sequence: Synthetic oligonucleotide
acagacaaagtcagaagccaa

SEQ ID NO: 40083 - DNA, 21 bp, Artificial Sequence
  Description of Artificial Sequence: Synthetic oligonucleotide
acagacctccacctcgaactc

SEQ ID NO: 40084 - DNA, 21 bp, Artificial Sequence
  Description of Artificial Sequence: Synthetic oligonucleotide
acagacctcagccacggacac

SEQ ID NO: 40085 - DNA, 21 bp, Artificial Sequence
  Description of Artificial Sequence: Synthetic oligonucleotide
acagacctctacagccaaagc

SEQ ID NO: 40086 - DNA, 21 bp, Artificial Sequence
  Description of Artificial Sequence: Synthetic oligonucleotide
acagacatgcaaagactcgga

SEQ ID NO: 40087 - DNA, 21 bp, Artificial Sequence
  Description of Artificial Sequence: Synthetic oligonucleotide
acagacaacagaatcacagca

SEQ ID NO: 40088 - DNA, 21 bp, Artificial Sequence
  Description of Artificial Sequence: Synthetic oligonucleotide
acagacccacacagcgacaaa

SEQ ID NO: 40089 - DNA, 21 bp, Artificial Sequence
  Description of Artificial Sequence: Synthetic oligonucleotide
acagaccaaagcctcatgagc

SEQ ID NO: 40090 - DNA, 21 bp, Artificial Sequence
  Description of Artificial Sequence: Synthetic oligonucleotide
acagacagaggaggagtccaa

SEQ ID NO: 40091 - DNA, 21 bp, Artificial Sequence
  Description of Artificial Sequence: Synthetic oligonucleotide
acagacagaagcgcactcagc

SEQ ID NO: 40092 - DNA, 21 bp, Artificial Sequence
  Description of Artificial Sequence: Synthetic oligonucleotide
acagacagaagcagcctcagc

SEQ ID NO: 40093 - DNA, 21 bp, Artificial Sequence
  Description of Artificial Sequence: Synthetic oligonucleotide
acagacagagtcccaagcttc

SEQ ID NO: 40094 - DNA, 21 bp, Artificial Sequence
  Description of Artificial Sequence: Synthetic oligonucleotide
acagacagcggaccaacacca

SEQ ID NO: 40095 - DNA, 21 bp, Artificial Sequence
  Description of Artificial Sequence: Synthetic oligonucleotide
acagacagccacgtcctctac

SEQ ID NO: 40096 - DNA, 21 bp, Artificial Sequence
  Description of Artificial Sequence: Synthetic oligonucleotide
acagacacacacagcagcgtc

SEQ ID NO: 40097 - DNA, 21 bp, Artificial Sequence
  Description of Artificial Sequence: Synthetic oligonucleotide
acagacacaagcagaggactc

SEQ ID NO: 40098 - DNA, 21 bp, Artificial Sequence
  Description of Artificial Sequence: Synthetic oligonucleotide
acagacacaacaggaggacca

SEQ ID NO: 40099 - DNA, 21 bp, Artificial Sequence
  Description of Artificial Sequence: Synthetic oligonucleotide
acagacgtcatcacagtcgca

SEQ ID NO: 40100 - DNA, 21 bp, Artificial Sequence
  Description of Artificial Sequence: Synthetic oligonucleotide
acagacgtcccacacccaaac

SEQ ID NO: 40101 - DNA, 21 bp, Artificial Sequence
  Description of Artificial Sequence: Synthetic oligonucleotide
acagacgtcagaccagcagga

SEQ ID NO: 40102 - DNA, 21 bp, Artificial Sequence
  Description of Artificial Sequence: Synthetic oligonucleotide
acagacgtcagaacaaaaaac

SEQ ID NO: 40103 - DNA, 21 bp, Artificial Sequence
  Description of Artificial Sequence: Synthetic oligonucleotide
acagactgggaacacgaccca

SEQ ID NO: 40104 - DNA, 21 bp, Artificial Sequence
  Description of Artificial Sequence: Synthetic oligonucleotide
acagactacgacctcagcagc

SEQ ID NO: 40105 - DNA, 21 bp, Artificial Sequence
  Description of Artificial Sequence: Synthetic oligonucleotide
acagaagcagcaagcagacaa

SEQ ID NO: 40106 - DNA, 21 bp, Artificial Sequence
  Description of Artificial Sequence: Synthetic oligonucleotide
acagaagcaagaaacccagtc

SEQ ID NO: 40107 - DNA, 21 bp, Artificial Sequence
  Description of Artificial Sequence: Synthetic oligonucleotide
acagaagacacagcaccatgc

SEQ ID NO: 40108 - DNA, 21 bp, Artificial Sequence
  Description of Artificial Sequence: Synthetic oligonucleotide
acagaattctacgacctcgaa

SEQ ID NO: 40109 - DNA, 21 bp, Artificial Sequence
  Description of Artificial Sequence: Synthetic oligonucleotide
acagaaggaagagcaccaaca

SEQ ID NO: 40110 - DNA, 21 bp, Artificial Sequence
  Description of Artificial Sequence: Synthetic oligonucleotide
acagaacacggaacaaaaatc

SEQ ID NO: 40111 - DNA, 21 bp, Artificial Sequence
  Description of Artificial Sequence: Synthetic oligonucleotide
acagaactcaacagagcaatc

SEQ ID NO: 40112 - DNA, 21 bp, Artificial Sequence
  Description of Artificial Sequence: Synthetic oligonucleotide
acagaactcagccacaacaga

SEQ ID NO: 40113 - DNA, 21 bp, Artificial Sequence
  Description of Artificial Sequence: Synthetic oligonucleotide
acagaactcagcagcccaaga

SEQ ID NO: 40114 - DNA, 21 bp, Artificial Sequence
  Description of Artificial Sequence: Synthetic oligonucleotide
acagaactcgtcatcggaaaa

SEQ ID NO: 40115 - DNA, 21 bp, Artificial Sequence
  Description of Artificial Sequence: Synthetic oligonucleotide
acagaaaacgcaggaacagga

SEQ ID NO: 40116 - DNA, 21 bp, Artificial Sequence
  Description of Artificial Sequence: Synthetic oligonucleotide
acagaaccaccacacgtcgca

SEQ ID NO: 40117 - DNA, 21 bp, Artificial Sequence
  Description of Artificial Sequence: Synthetic oligonucleotide
acagaaccaccatacagactc

SEQ ID NO: 40118 - DNA, 21 bp, Artificial Sequence
  Description of Artificial Sequence: Synthetic oligonucleotide
acagaaccacaaatcggaaga

SEQ ID NO: 40119 - DNA, 21 bp, Artificial Sequence
  Description of Artificial Sequence: Synthetic oligonucleotide
acagaaccaagaatggtcagc

SEQ ID NO: 40120 - DNA, 21 bp, Artificial Sequence
  Description of Artificial Sequence: Synthetic oligonucleotide
acagaaccatacgcaccagac

SEQ ID NO: 40121 - DNA, 21 bp, Artificial Sequence
  Description of Artificial Sequence: Synthetic oligonucleotide
acagaaccatacacagacttc

SEQ ID NO: 40122 - DNA, 21 bp, Artificial Sequence
  Description of Artificial Sequence: Synthetic oligonucleotide
acagaaagagcagacgaacac

SEQ ID NO: 40123 - DNA, 21 bp, Artificial Sequence
  Description of Artificial Sequence: Synthetic oligonucleotide
acagaaagaccaagcccaaca

SEQ ID NO: 40124 - DNA, 21 bp, Artificial Sequence
  Description of Artificial Sequence: Synthetic oligonucleotide
acagaaagccaccacccactc

SEQ ID NO: 40125 - DNA, 21 bp, Artificial Sequence
  Description of Artificial Sequence: Synthetic oligonucleotide
acagaaagcacattcaacatg

SEQ ID NO: 40126 - DNA, 21 bp, Artificial Sequence
  Description of Artificial Sequence: Synthetic oligonucleotide
acagaaagcacacaccaaaca

SEQ ID NO: 40127 - DNA, 21 bp, Artificial Sequence
  Description of Artificial Sequence: Synthetic oligonucleotide
acagaaacagcaagcagccca

SEQ ID NO: 40128 - DNA, 21 bp, Artificial Sequence
  Description of Artificial Sequence: Synthetic oligonucleotide
acagaaacaggaaactgccac

SEQ ID NO: 40129 - DNA, 21 bp, Artificial Sequence
  Description of Artificial Sequence: Synthetic oligonucleotide
acagaaacactccacaacaga

SEQ ID NO: 40130 - DNA, 21 bp, Artificial Sequence
  Description of Artificial Sequence: Synthetic oligonucleotide
acagaaacagtcggagacctc

SEQ ID NO: 40131 - DNA, 21 bp, Artificial Sequence
  Description of Artificial Sequence: Synthetic oligonucleotide
acagaagtcaaactcctccca

SEQ ID NO: 40132 - DNA, 21 bp, Artificial Sequence
  Description of Artificial Sequence: Synthetic oligonucleotide
acagaagtcagaccaggactc

SEQ ID NO: 40133 - DNA, 21 bp, Artificial Sequence
  Description of Artificial Sequence: Synthetic oligonucleotide
acagaagtcagaagcccactc

SEQ ID NO: 40134 - DNA, 21 bp, Artificial Sequence
  Description of Artificial Sequence: Synthetic oligonucleotide
acagaagtcagcagcaacaaa

SEQ ID NO: 40135 - DNA, 21 bp, Artificial Sequence
  Description of Artificial Sequence: Synthetic oligonucleotide
acagaatggagcagcaacgac

SEQ ID NO: 40136 - DNA, 21 bp, Artificial Sequence
  Description of Artificial Sequence: Synthetic oligonucleotide
acagaatacgcaacaagacca

SEQ ID NO: 40137 - DNA, 21 bp, Artificial Sequence
  Description of Artificial Sequence: Synthetic oligonucleotide
acagaatacacactccacgga

SEQ ID NO: 40138 - DNA, 21 bp, Artificial Sequence
  Description of Artificial Sequence: Synthetic oligonucleotide
acattcgcaagcggagcacca

SEQ ID NO: 40139 - DNA, 21 bp, Artificial Sequence
  Description of Artificial Sequence: Synthetic oligonucleotide
acattcgcaagcccactcctc

SEQ ID NO: 40140 - DNA, 21 bp, Artificial Sequence
  Description of Artificial Sequence: Synthetic oligonucleotide
acattcgacccacaatgggca

SEQ ID NO: 40141 - DNA, 21 bp, Artificial Sequence
  Description of Artificial Sequence: Synthetic oligonucleotide
acattcgacacaagaggaagc

SEQ ID NO: 40142 - DNA, 21 bp, Artificial Sequence
  Description of Artificial Sequence: Synthetic oligonucleotide
acattcggagcaatcagcgca

SEQ ID NO: 40143 - DNA, 21 bp, Artificial Sequence
  Description of Artificial Sequence: Synthetic oligonucleotide
acattcggaagcgacggaaca

SEQ ID NO: 40144 - DNA, 21 bp, Artificial Sequence
  Description of Artificial Sequence: Synthetic oligonucleotide
acattcggaacaagcatcaaa

SEQ ID NO: 40145 - DNA, 21 bp, Artificial Sequence
  Description of Artificial Sequence: Synthetic oligonucleotide
acattccacgcaccaagcagc

SEQ ID NO: 40146 - DNA, 21 bp, Artificial Sequence
  Description of Artificial Sequence: Synthetic oligonucleotide
acattccacagaacagacaac

SEQ ID NO: 40147 - DNA, 21 bp, Artificial Sequence
  Description of Artificial Sequence: Synthetic oligonucleotide
acattcaaagacccaacagtc

SEQ ID NO: 40148 - DNA, 21 bp, Artificial Sequence
  Description of Artificial Sequence: Synthetic oligonucleotide
acattcaaaatcacaggagac

SEQ ID NO: 40149 - DNA, 21 bp, Artificial Sequence
  Description of Artificial Sequence: Synthetic oligonucleotide
acattcaacggaatgaacgaa

SEQ ID NO: 40150 - DNA, 21 bp, Artificial Sequence
  Description of Artificial Sequence: Synthetic oligonucleotide
acattcccactcccaagaaca

SEQ ID NO: 40151 - DNA, 21 bp, Artificial Sequence
  Description of Artificial Sequence: Synthetic oligonucleotide
acattcccactcagcgactgg

SEQ ID NO: 40152 - DNA, 21 bp, Artificial Sequence
  Description of Artificial Sequence: Synthetic oligonucleotide
acattcccaacaagcggaatg

SEQ ID NO: 40153 - DNA, 21 bp, Artificial Sequence
  Description of Artificial Sequence: Synthetic oligonucleotide
acattccaaccaacaagcgtc

SEQ ID NO: 40154 - DNA, 21 bp, Artificial Sequence
  Description of Artificial Sequence: Synthetic oligonucleotide
acattcagaggaatgaaagac

SEQ ID NO: 40155 - DNA, 21 bp, Artificial Sequence
  Description of Artificial Sequence: Synthetic oligonucleotide
acattcagaacaagcgtcgca

SEQ ID NO: 40156 - DNA, 21 bp, Artificial Sequence
  Description of Artificial Sequence: Synthetic oligonucleotide
acattcagcatcgtcagccca

SEQ ID NO: 40157 - DNA, 21 bp, Artificial Sequence
  Description of Artificial Sequence: Synthetic oligonucleotide
acattcagcccaccaaacttc

SEQ ID NO: 40158 - DNA, 21 bp, Artificial Sequence
  Description of Artificial Sequence: Synthetic oligonucleotide
acattcagcccaacattcagc

SEQ ID NO: 40159 - DNA, 21 bp, Artificial Sequence
  Description of Artificial Sequence: Synthetic oligonucleotide
acattcagcagcacaagccac

SEQ ID NO: 40160 - DNA, 21 bp, Artificial Sequence
  Description of Artificial Sequence: Synthetic oligonucleotide
acattcagcagcgtcgcagca

SEQ ID NO: 40161 - DNA, 21 bp, Artificial Sequence
  Description of Artificial Sequence: Synthetic oligonucleotide
acattcagcagcgtcacagga

SEQ ID NO: 40162 - DNA, 21 bp, Artificial Sequence
  Description of Artificial Sequence: Synthetic oligonucleotide
acattcagcacaggaagagtc

SEQ ID NO: 40163 - DNA, 21 bp, Artificial Sequence
  Description of Artificial Sequence: Synthetic oligonucleotide
acattcagcacaggaagccca

SEQ ID NO: 40164 - DNA, 21 bp, Artificial Sequence
  Description of Artificial Sequence: Synthetic oligonucleotide
acattcagcacaaacacaagc

SEQ ID NO: 40165 - DNA, 21 bp, Artificial Sequence
  Description of Artificial Sequence: Synthetic oligonucleotide
acattcagcgtcagccaaatc

SEQ ID NO: 40166 - DNA, 21 bp, Artificial Sequence
  Description of Artificial Sequence: Synthetic oligonucleotide
acattcacaaacccaacaaac

SEQ ID NO: 40167 - DNA, 21 bp, Artificial Sequence
  Description of Artificial Sequence: Synthetic oligonucleotide
acattcacacaactcgcaagc

SEQ ID NO: 40168 - DNA, 21 bp, Artificial Sequence
  Description of Artificial Sequence: Synthetic oligonucleotide
acattcgtcagagaagtcgtc

SEQ ID NO: 40169 - DNA, 21 bp, Artificial Sequence
  Description of Artificial Sequence: Synthetic oligonucleotide
acattcgtcagcggaggagac

SEQ ID NO: 40170 - DNA, 21 bp, Artificial Sequence
  Description of Artificial Sequence: Synthetic oligonucleotide
acaggagcaggacaaacactc

SEQ ID NO: 40171 - DNA, 21 bp, Artificial Sequence
  Description of Artificial Sequence: Synthetic oligonucleotide
acaggagcacacgtcggagaa

SEQ ID NO: 40172 - DNA, 21 bp, Artificial Sequence
  Description of Artificial Sequence: Synthetic oligonucleotide
acaggagcactcgcaacactc

SEQ ID NO: 40173 - DNA, 21 bp, Artificial Sequence
  Description of Artificial Sequence: Synthetic oligonucleotide
acaggagcaccaccacaaatc

SEQ ID NO: 40174 - DNA, 21 bp, Artificial Sequence
  Description of Artificial Sequence: Synthetic oligonucleotide
acaggagcaagcgtcctcttc

SEQ ID NO: 40175 - DNA, 21 bp, Artificial Sequence
  Description of Artificial Sequence: Synthetic oligonucleotide
acaggagcagtcttcacacca

SEQ ID NO: 40176 - DNA, 21 bp, Artificial Sequence
  Description of Artificial Sequence: Synthetic oligonucleotide
acaggagacgcaacaccattc

SEQ ID NO: 40177 - DNA, 21 bp, Artificial Sequence
  Description of Artificial Sequence: Synthetic oligonucleotide
acaggagaccaaaaatggcac

SEQ ID NO: 40178 - DNA, 21 bp, Artificial Sequence
  Description of Artificial Sequence: Synthetic oligonucleotide
acaggagaccaaaacagatac

SEQ ID NO: 40179 - DNA, 21 bp, Artificial Sequence
  Description of Artificial Sequence: Synthetic oligonucleotide
acaggagacacaagcagaaca

SEQ ID NO: 40180 - DNA, 21 bp, Artificial Sequence
  Description of Artificial Sequence: Synthetic oligonucleotide
acaggagacgtcgacggatgg

SEQ ID NO: 40181 - DNA, 21 bp, Artificial Sequence
  Description of Artificial Sequence: Synthetic oligonucleotide
acaggagaacaaccaggacac

SEQ ID NO: 40182 - DNA, 21 bp, Artificial Sequence
  Description of Artificial Sequence: Synthetic oligonucleotide
acaggattcagcgaccaattc

SEQ ID NO: 40183 - DNA, 21 bp, Artificial Sequence
  Description of Artificial Sequence: Synthetic oligonucleotide
acaggaggagcacaaagagga

SEQ ID NO: 40184 - DNA, 21 bp, Artificial Sequence
  Description of Artificial Sequence: Synthetic oligonucleotide
acaggaggaagcccaacaagc

SEQ ID NO: 40185 - DNA, 21 bp, Artificial Sequence
  Description of Artificial Sequence: Synthetic oligonucleotide
acaggaggaagcacaagactc

SEQ ID NO: 40186 - DNA, 21 bp, Artificial Sequence
  Description of Artificial Sequence: Synthetic oligonucleotide
acaggaggatacgtcctcgca

SEQ ID NO: 40187 - DNA, 21 bp, Artificial Sequence
  Description of Artificial Sequence: Synthetic oligonucleotide
acaggacacgcacaaaaccaa

SEQ ID NO: 40188 - DNA, 21 bp, Artificial Sequence
  Description of Artificial Sequence: Synthetic oligonucleotide
acaggacacgacacagtcgaa

SEQ ID NO: 40189 - DNA, 21 bp, Artificial Sequence
  Description of Artificial Sequence: Synthetic oligonucleotide
acaggacacacaagactcgac

SEQ ID NO: 40190 - DNA, 21 bp, Artificial Sequence
  Description of Artificial Sequence: Synthetic oligonucleotide
acaggacacacaagcacactc

SEQ ID NO: 40191 - DNA, 21 bp, Artificial Sequence
  Description of Artificial Sequence: Synthetic oligonucleotide
acaggaatcgcaccaaacagc

SEQ ID NO: 40192 - DNA, 21 bp, Artificial Sequence
  Description of Artificial Sequence: Synthetic oligonucleotide
acaggaatcagcagccacatg

SEQ ID NO: 40193 - DNA, 21 bp, Artificial Sequence
  Description of Artificial Sequence: Synthetic oligonucleotide
acaggaatcacaggagcacca

SEQ ID NO: 40194 - DNA, 21 bp, Artificial Sequence
  Description of Artificial Sequence: Synthetic oligonucleotide
acaggaaaagtcctcggattc

SEQ ID NO: 40195 - DNA, 21 bp, Artificial Sequence
  Description of Artificial Sequence: Synthetic oligonucleotide
acaggactctgcccacaccca

SEQ ID NO: 40196 - DNA, 21 bp, Artificial Sequence
  Description of Artificial Sequence: Synthetic oligonucleotide
acaggactcggactcctcaca

SEQ ID NO: 40197 - DNA, 21 bp, Artificial Sequence
  Description of Artificial Sequence: Synthetic oligonucleotide
acaggactcatgggaccagtc

SEQ ID NO: 40198 - DNA, 21 bp, Artificial Sequence
  Description of Artificial Sequence: Synthetic oligonucleotide
acaggactcaaccacttcaac

SEQ ID NO: 40199 - DNA, 21 bp, Artificial Sequence
  Description of Artificial Sequence: Synthetic oligonucleotide
acaggactcaacccagcactc

SEQ ID NO: 40200 - DNA, 21 bp, Artificial Sequence
  Description of Artificial Sequence: Synthetic oligonucleotide
acaggactcccagtcggattc

SEQ ID NO: 40201 - DNA, 21 bp, Artificial Sequence
  Description of Artificial Sequence: Synthetic oligonucleotide
acaggactcagaggaacagtc

SEQ ID NO: 40202 - DNA, 21 bp, Artificial Sequence
  Description of Artificial Sequence: Synthetic oligonucleotide
acaggactcgtcacagacgaa

SEQ ID NO: 40203 - DNA, 21 bp, Artificial Sequence
  Description of Artificial Sequence: Synthetic oligonucleotide
acaggaatgaacaacttcagc

SEQ ID NO: 40204 - DNA, 21 bp, Artificial Sequence
  Description of Artificial Sequence: Synthetic oligonucleotide
acaggaatgcaagcagcactc

SEQ ID NO: 40205 - DNA, 21 bp, Artificial Sequence
  Description of Artificial Sequence: Synthetic oligonucleotide
acaggaaaccacatcagaatc

SEQ ID NO: 40206 - DNA, 21 bp, Artificial Sequence
  Description of Artificial Sequence: Synthetic oligonucleotide
acaggaaaccacgtcacattc

SEQ ID NO: 40207 - DNA, 21 bp, Artificial Sequence
  Description of Artificial Sequence: Synthetic oligonucleotide
acaggaaacatcagcccactc

SEQ ID NO: 40208 - DNA, 21 bp, Artificial Sequence
  Description of Artificial Sequence: Synthetic oligonucleotide
acaggaaacagcccacacgca

SEQ ID NO: 40209 - DNA, 21 bp, Artificial Sequence
  Description of Artificial Sequence: Synthetic oligonucleotide
acaggaccagcaccactcgac

SEQ ID NO: 40210 - DNA, 21 bp, Artificial Sequence
  Description of Artificial Sequence: Synthetic oligonucleotide
acaggaccagcaagaggaagc

SEQ ID NO: 40211 - DNA, 21 bp, Artificial Sequence
  Description of Artificial Sequence: Synthetic oligonucleotide
acaggaccagactacccaaaa

SEQ ID NO: 40212 - DNA, 21 bp, Artificial Sequence
  Description of Artificial Sequence: Synthetic oligonucleotide
acaggaccacacctcaaagca

SEQ ID NO: 40213 - DNA, 21 bp, Artificial Sequence
  Description of Artificial Sequence: Synthetic oligonucleotide
acaggaccaatcaacgcacca

SEQ ID NO: 40214 - DNA, 21 bp, Artificial Sequence
  Description of Artificial Sequence: Synthetic oligonucleotide
acaggaccaaacacaagcaca

SEQ ID NO: 40215 - DNA, 21 bp, Artificial Sequence
  Description of Artificial Sequence: Synthetic oligonucleotide
acaggaccaccaacaacaatg

SEQ ID NO: 40216 - DNA, 21 bp, Artificial Sequence
  Description of Artificial Sequence: Synthetic oligonucleotide
acaggaccaagactcagcaca

SEQ ID NO: 40217 - DNA, 21 bp, Artificial Sequence
  Description of Artificial Sequence: Synthetic oligonucleotide
acaggaccaagcgcaagagca

SEQ ID NO: 40218 - DNA, 21 bp, Artificial Sequence
  Description of Artificial Sequence: Synthetic oligonucleotide
acaggaccaagcatccacaca

SEQ ID NO: 40219 - DNA, 21 bp, Artificial Sequence
  Description of Artificial Sequence: Synthetic oligonucleotide
acaggaccaagcctcgacaga

SEQ ID NO: 40220 - DNA, 21 bp, Artificial Sequence
  Description of Artificial Sequence: Synthetic oligonucleotide
acaggaccaagcagaacaagc

SEQ ID NO: 40221 - DNA, 21 bp, Artificial Sequence
  Description of Artificial Sequence: Synthetic oligonucleotide
acaggacaaggaaacgcagac

SEQ ID NO: 40222 - DNA, 21 bp, Artificial Sequence
  Description of Artificial Sequence: Synthetic oligonucleotide
acaggacaaagagcaggacaa

SEQ ID NO: 40223 - DNA, 21 bp, Artificial Sequence
  Description of Artificial Sequence: Synthetic oligonucleotide
acaggacaaagaatggacctc

SEQ ID NO: 40224 - DNA, 21 bp, Artificial Sequence
  Description of Artificial Sequence: Synthetic oligonucleotide
acaggacaaagacaaaacgtc

SEQ ID NO: 40225 - DNA, 21 bp, Artificial Sequence
  Description of Artificial Sequence: Synthetic oligonucleotide
acaggaagaccagtcggaaac

SEQ ID NO: 40226 - DNA, 21 bp, Artificial Sequence
  Description of Artificial Sequence: Synthetic oligonucleotide
acaggaagagtcgcaggaagc

SEQ ID NO: 40227 - DNA, 21 bp, Artificial Sequence
  Description of Artificial Sequence: Synthetic oligonucleotide
acaggaagcgcaggagaaaaa

SEQ ID NO: 40228 - DNA, 21 bp, Artificial Sequence
  Description of Artificial Sequence: Synthetic oligonucleotide
acaggaagcgcacacgtcagc

SEQ ID NO: 40229 - DNA, 21 bp, Artificial Sequence
  Description of Artificial Sequence: Synthetic oligonucleotide
acaggaagcgcaatgagacca

SEQ ID NO: 40230 - DNA, 21 bp, Artificial Sequence
  Description of Artificial Sequence: Synthetic oligonucleotide
acaggaagcggacacggacca

SEQ ID NO: 40231 - DNA, 21 bp, Artificial Sequence
  Description of Artificial Sequence: Synthetic oligonucleotide
acaggaagcaaaccaggaagc

SEQ ID NO: 40232 - DNA, 21 bp, Artificial Sequence
  Description of Artificial Sequence: Synthetic oligonucleotide
acaggaagcctccaatacgac

SEQ ID NO: 40233 - DNA, 21 bp, Artificial Sequence
  Description of Artificial Sequence: Synthetic oligonucleotide
acaggaagcagcggattcctc

SEQ ID NO: 40234 - DNA, 21 bp, Artificial Sequence
  Description of Artificial Sequence: Synthetic oligonucleotide
acaggaagcagcgtcagagca

SEQ ID NO: 40235 - DNA, 21 bp, Artificial Sequence
  Description of Artificial Sequence: Synthetic oligonucleotide
acaggaacaggaagaatccac

SEQ ID NO: 40236 - DNA, 21 bp, Artificial Sequence
  Description of Artificial Sequence: Synthetic oligonucleotide
acaggaacaagcagctgggtc

SEQ ID NO: 40237 - DNA, 21 bp, Artificial Sequence
  Description of Artificial Sequence: Synthetic oligonucleotide
acaggaacaacactccaccca

SEQ ID NO: 40238 - DNA, 21 bp, Artificial Sequence
  Description of Artificial Sequence: Synthetic oligonucleotide
acaggagtcccaagaggattc

SEQ ID NO: 40239 - DNA, 21 bp, Artificial Sequence
  Description of Artificial Sequence: Synthetic oligonucleotide
acaggagtcccaagaccatac

SEQ ID NO: 40240 - DNA, 21 bp, Artificial Sequence
  Description of Artificial Sequence: Synthetic oligonucleotide
acaggagtcccagtcgacgca

SEQ ID NO: 40241 - DNA, 21 bp, Artificial Sequence
  Description of Artificial Sequence: Synthetic oligonucleotide
acaggatacgaattcaaactc

SEQ ID NO: 40242 - DNA, 21 bp, Artificial Sequence
  Description of Artificial Sequence: Synthetic oligonucleotide
acaggatacaaaagcccaaac

SEQ ID NO: 40243 - DNA, 21 bp, Artificial Sequence
  Description of Artificial Sequence: Synthetic oligonucleotide
acacacgcagcagcagacttc

SEQ ID NO: 40244 - DNA, 21 bp, Artificial Sequence
  Description of Artificial Sequence: Synthetic oligonucleotide
acacacgcaatcatcgtcaca

SEQ ID NO: 40245 - DNA, 21 bp, Artificial Sequence
  Description of Artificial Sequence: Synthetic oligonucleotide
acacacgcacaaacaagcgtc

SEQ ID NO: 40246 - DNA, 21 bp, Artificial Sequence
  Description of Artificial Sequence: Synthetic oligonucleotide
acacacgacgaagacagaaga

SEQ ID NO: 40247 - DNA, 21 bp, Artificial Sequence
  Description of Artificial Sequence: Synthetic oligonucleotide
acacacgaccacgcagacagc

SEQ ID NO: 40248 - DNA, 21 bp, Artificial Sequence
  Description of Artificial Sequence: Synthetic oligonucleotide
acacacgacctcagcctcgca

SEQ ID NO: 40249 - DNA, 21 bp, Artificial Sequence
  Description of Artificial Sequence: Synthetic oligonucleotide
acacacgacccaagacacgga

SEQ ID NO: 40250 - DNA, 21 bp, Artificial Sequence
  Description of Artificial Sequence: Synthetic oligonucleotide
acacacgaacactacagccac

SEQ ID NO: 40251 - DNA, 21 bp, Artificial Sequence
  Description of Artificial Sequence: Synthetic oligonucleotide
acacacgaaccaagaagagca

SEQ ID NO: 40252 - DNA, 21 bp, Artificial Sequence
  Description of Artificial Sequence: Synthetic oligonucleotide
acacacgaaagcgcagcagca

SEQ ID NO: 40253 - DNA, 21 bp, Artificial Sequence
  Description of Artificial Sequence: Synthetic oligonucleotide
acacacttcccaggactccca

SEQ ID NO: 40254 - DNA, 21 bp, Artificial Sequence
  Description of Artificial Sequence: Synthetic oligonucleotide
acacacggaagactcccaaac

SEQ ID NO: 40255 - DNA, 21 bp, Artificial Sequence
  Description of Artificial Sequence: Synthetic oligonucleotide
acacaccacgcagcactcaca

SEQ ID NO: 40256 - DNA, 21 bp, Artificial Sequence
  Description of Artificial Sequence: Synthetic oligonucleotide
acacaccacagcggaagcatc

SEQ ID NO: 40257 - DNA, 21 bp, Artificial Sequence
  Description of Artificial Sequence: Synthetic oligonucleotide
acacaccacgtcacacaaaca

SEQ ID NO: 40258 - DNA, 21 bp, Artificial Sequence
  Description of Artificial Sequence: Synthetic oligonucleotide
acacacatcccaagcagacca

SEQ ID NO: 40259 - DNA, 21 bp, Artificial Sequence
  Description of Artificial Sequence: Synthetic oligonucleotide
acacacatcagaagcgcacaa

SEQ ID NO: 40260 - DNA, 21 bp, Artificial Sequence
  Description of Artificial Sequence: Synthetic oligonucleotide
acacacaaagaaacacacatg

SEQ ID NO: 40261 - DNA, 21 bp, Artificial Sequence
  Description of Artificial Sequence: Synthetic oligonucleotide
acacacaaattcccaacaagc

SEQ ID NO: 40262 - DNA, 21 bp, Artificial Sequence
  Description of Artificial Sequence: Synthetic oligonucleotide
acacacaaactcacagcagaa

SEQ ID NO: 40263 - DNA, 21 bp, Artificial Sequence
  Description of Artificial Sequence: Synthetic oligonucleotide
acacacaaaagcatcagcaac

SEQ ID NO: 40264 - DNA, 21 bp, Artificial Sequence
  Description of Artificial Sequence: Synthetic oligonucleotide
acacacctcgcaagcagcgac

SEQ ID NO: 40265 - DNA, 21 bp, Artificial Sequence
  Description of Artificial Sequence: Synthetic oligonucleotide
acacacctcggagaaagcgtc

SEQ ID NO: 40266 - DNA, 21 bp, Artificial Sequence
  Description of Artificial Sequence: Synthetic oligonucleotide
acacacctcagcaacacactc

SEQ ID NO: 40267 - DNA, 21 bp, Artificial Sequence
  Description of Artificial Sequence: Synthetic oligonucleotide
acacacctcagcacagcaaaa

SEQ ID NO: 40268 - DNA, 21 bp, Artificial Sequence
  Description of Artificial Sequence: Synthetic oligonucleotide
acacacctcagcacaccaagc

SEQ ID NO: 40269 - DNA, 21 bp, Artificial Sequence
  Description of Artificial Sequence: Synthetic oligonucleotide
acacacatgatcggaaacaca

SEQ ID NO: 40270 - DNA, 21 bp, Artificial Sequence
  Description of Artificial Sequence: Synthetic oligonucleotide
acacacaacgcactcacagtc

SEQ ID NO: 40271 - DNA, 21 bp, Artificial Sequence
  Description of Artificial Sequence: Synthetic oligonucleotide
acacacaacctcagcatcaga

SEQ ID NO: 40272 - DNA, 21 bp, Artificial Sequence
  Description of Artificial Sequence: Synthetic oligonucleotide
acacacccagcagtcacacaa

SEQ ID NO: 40273 - DNA, 21 bp, Artificial Sequence
  Description of Artificial Sequence: Synthetic oligonucleotide
acacacccagacagaggactc

SEQ ID NO: 40274 - DNA, 21 bp, Artificial Sequence
  Description of Artificial Sequence: Synthetic oligonucleotide
acacacccaaaaccaacactc

SEQ ID NO: 40275 - DNA, 21 bp, Artificial Sequence
  Description of Artificial Sequence: Synthetic oligonucleotide
acacacccacaaagcgtcgac

SEQ ID NO: 40276 - DNA, 21 bp, Artificial Sequence
  Description of Artificial Sequence: Synthetic oligonucleotide
acacacccaagcgtcccagtc

SEQ ID NO: 40277 - DNA, 21 bp, Artificial Sequence
  Description of Artificial Sequence: Synthetic oligonucleotide
acacacccagtcggaatcctc

SEQ ID NO: 40278 - DNA, 21 bp, Artificial Sequence
  Description of Artificial Sequence: Synthetic oligonucleotide
acacacccagtcagcagcgtc

SEQ ID NO: 40279 - DNA, 21 bp, Artificial Sequence
  Description of Artificial Sequence: Synthetic oligonucleotide
acacaccaaacaagcgtctac

SEQ ID NO: 40280 - DNA, 21 bp, Artificial Sequence
  Description of Artificial Sequence: Synthetic oligonucleotide
acacaccaagtcccaagcgtc

SEQ ID NO: 40281 - DNA, 21 bp, Artificial Sequence
  Description of Artificial Sequence: Synthetic oligonucleotide
acacacagagacggaatcatg

SEQ ID NO: 40282 - DNA, 21 bp, Artificial Sequence
  Description of Artificial Sequence: Synthetic oligonucleotide
acacacagacaagacacaagc

SEQ ID NO: 40283 - DNA, 21 bp, Artificial Sequence
  Description of Artificial Sequence: Synthetic oligonucleotide
acacacagaagcctcgacgtc

SEQ ID NO: 40284 - DNA, 21 bp, Artificial Sequence
  Description of Artificial Sequence: Synthetic oligonucleotide
acacacagaagccaaacagtc

SEQ ID NO: 40285 - DNA, 21 bp, Artificial Sequence
  Description of Artificial Sequence: Synthetic oligonucleotide
acacacagcgcatacaaccac

SEQ ID NO: 40286 - DNA, 21 bp, Artificial Sequence
  Description of Artificial Sequence: Synthetic oligonucleotide
acacacagcgaaagcagcaaa

SEQ ID NO: 40287 - DNA, 21 bp, Artificial Sequence
  Description of Artificial Sequence: Synthetic oligonucleotide
acacacagcggagcaaacaac

SEQ ID NO: 40288 - DNA, 21 bp, Artificial Sequence
  Description of Artificial Sequence: Synthetic oligonucleotide
acacacagccacgtcgacgac

SEQ ID NO: 40289 - DNA, 21 bp, Artificial Sequence
  Description of Artificial Sequence: Synthetic oligonucleotide
acacacagcatggtcatgcca

SEQ ID NO: 40290 - DNA, 21 bp, Artificial Sequence
  Description of Artificial Sequence: Synthetic oligonucleotide
acacacagcccactcacaaga

SEQ ID NO: 40291 - DNA, 21 bp, Artificial Sequence
  Description of Artificial Sequence: Synthetic oligonucleotide
acacacacactcaacacaaga

SEQ ID NO: 40292 - DNA, 21 bp, Artificial Sequence
  Description of Artificial Sequence: Synthetic oligonucleotide
acacacacaccactcccagca

SEQ ID NO: 40293 - DNA, 21 bp, Artificial Sequence
  Description of Artificial Sequence: Synthetic oligonucleotide
acacacacaagaacactcatg

SEQ ID NO: 40294 - DNA, 21 bp, Artificial Sequence
  Description of Artificial Sequence: Synthetic oligonucleotide
acacacacaagcgcagcagaa

SEQ ID NO: 40295 - DNA, 21 bp, Artificial Sequence
  Description of Artificial Sequence: Synthetic oligonucleotide
acacacacagtcggaacacaa

SEQ ID NO: 40296 - DNA, 21 bp, Artificial Sequence
  Description of Artificial Sequence: Synthetic oligonucleotide
acacacgtcgcagaagtcaca

SEQ ID NO: 40297 - DNA, 21 bp, Artificial Sequence
  Description of Artificial Sequence: Synthetic oligonucleotide
acacacgtcccaccaatgaga

SEQ ID NO: 40298 - DNA, 21 bp, Artificial Sequence
  Description of Artificial Sequence: Synthetic oligonucleotide
acacactacgacgtcgtcatg

SEQ ID NO: 40299 - DNA, 21 bp, Artificial Sequence
  Description of Artificial Sequence: Synthetic oligonucleotide
acaatcgcagacgaccaaaaa

SEQ ID NO: 40300 - DNA, 21 bp, Artificial Sequence
  Description of Artificial Sequence: Synthetic oligonucleotide
acaatcgcagacatgagaaca

SEQ ID NO: 40301 - DNA, 21 bp, Artificial Sequence
  Description of Artificial Sequence: Synthetic oligonucleotide
acaatctgcaacgacggacca

SEQ ID NO: 40302 - DNA, 21 bp, Artificial Sequence
  Description of Artificial Sequence: Synthetic oligonucleotide
acaatcgacccaccactcaca

SEQ ID NO: 40303 - DNA, 21 bp, Artificial Sequence
  Description of Artificial Sequence: Synthetic oligonucleotide
acaatcgacacaacaagcctc

SEQ ID NO: 40304 - DNA, 21 bp, Artificial Sequence
  Description of Artificial Sequence: Synthetic oligonucleotide
acaatcgaacaaagagaaaga

SEQ ID NO: 40305 - DNA, 21 bp, Artificial Sequence
  Description of Artificial Sequence: Synthetic oligonucleotide
acaatcgaaagcccaggagtc

SEQ ID NO: 40306 - DNA, 21 bp, Artificial Sequence
  Description of Artificial Sequence: Synthetic oligonucleotide
acaatcggacacgaaagctac

SEQ ID NO: 40307 - DNA, 21 bp, Artificial Sequence
  Description of Artificial Sequence: Synthetic oligonucleotide
acaatcggaagactcatgcaa

SEQ ID NO: 40308 - DNA, 21 bp, Artificial Sequence
  Description of Artificial Sequence: Synthetic oligonucleotide
acaatcggaagcgtcagactc

SEQ ID NO: 40309 - DNA, 21 bp, Artificial Sequence
  Description of Artificial Sequence: Synthetic oligonucleotide
acaatccacagaccagacatg

SEQ ID NO: 40310 - DNA, 21 bp, Artificial Sequence
  Description of Artificial Sequence: Synthetic oligonucleotide
acaatcatcccaagcaaactc

SEQ ID NO: 40311 - DNA, 21 bp, Artificial Sequence
  Description of Artificial Sequence: Synthetic oligonucleotide
acaatcatcagaaaagacagc

SEQ ID NO: 40312 - DNA, 21 bp, Artificial Sequence
  Description of Artificial Sequence: Synthetic oligonucleotide
acaatcaaagcacaagtcagc

SEQ ID NO: 40313 - DNA, 21 bp, Artificial Sequence
  Description of Artificial Sequence: Synthetic oligonucleotide
acaatcaaactcaacgtcgga

SEQ ID NO: 40314 - DNA, 21 bp, Artificial Sequence
  Description of Artificial Sequence: Synthetic oligonucleotide
acaatcaaaccactcagccaa

SEQ ID NO: 40315 - DNA, 21 bp, Artificial Sequence
  Description of Artificial Sequence: Synthetic oligonucleotide
acaatcctcaacccaaacaac

SEQ ID NO: 40316 - DNA, 21 bp, Artificial Sequence
  Description of Artificial Sequence: Synthetic oligonucleotide
acaatcctcagaacagaagaa

SEQ ID NO: 40317 - DNA, 21 bp, Artificial Sequence
  Description of Artificial Sequence: Synthetic oligonucleotide
acaatcctcagcagccacgga

SEQ ID NO: 40318 - DNA, 21 bp, Artificial Sequence
  Description of Artificial Sequence: Synthetic oligonucleotide
acaatcctcagcacaggaagc

SEQ ID NO: 40319 - DNA, 21 bp, Artificial Sequence
  Description of Artificial Sequence: Synthetic oligonucleotide
acaatcaaccacgcagaacaa

SEQ ID NO: 40320 - DNA, 21 bp, Artificial Sequence
  Description of Artificial Sequence: Synthetic oligonucleotide
acaatcaactgggtcggagac

SEQ ID NO: 40321 - DNA, 21 bp, Artificial Sequence
  Description of Artificial Sequence: Synthetic oligonucleotide
acaatcccaagccaaatcgca

SEQ ID NO: 40322 - DNA, 21 bp, Artificial Sequence
  Description of Artificial Sequence: Synthetic oligonucleotide
acaatccaactcagaagcgca

SEQ ID NO: 40323 - DNA, 21 bp, Artificial Sequence
  Description of Artificial Sequence: Synthetic oligonucleotide
acaatcagagaagcattcaca

SEQ ID NO: 40324 - DNA, 21 bp, Artificial Sequence
  Description of Artificial Sequence: Synthetic oligonucleotide
acaatcagaggaagcttcctc

SEQ ID NO: 40325 - DNA, 21 bp, Artificial Sequence
  Description of Artificial Sequence: Synthetic oligonucleotide
acaatcagaggaacaatcagc

SEQ ID NO: 40326 - DNA, 21 bp, Artificial Sequence
  Description of Artificial Sequence: Synthetic oligonucleotide
acaatcagagtcaacccaaca

SEQ ID NO: 40327 - DNA, 21 bp, Artificial Sequence
  Description of Artificial Sequence: Synthetic oligonucleotide
acaatcagagtcagcctcgca

SEQ ID NO: 40328 - DNA, 21 bp, Artificial Sequence
  Description of Artificial Sequence: Synthetic oligonucleotide
acaatcagcaacgcaagcagc

SEQ ID NO: 40329 - DNA, 21 bp, Artificial Sequence
  Description of Artificial Sequence: Synthetic oligonucleotide
acaatcagcagcagccaaagc

SEQ ID NO: 40330 - DNA, 21 bp, Artificial Sequence
  Description of Artificial Sequence: Synthetic oligonucleotide
acaatcagcacaagcaaacac

SEQ ID NO: 40331 - DNA, 21 bp, Artificial Sequence
  Description of Artificial Sequence: Synthetic oligonucleotide
acaatcacagcacacgaccca

SEQ ID NO: 40332 - DNA, 21 bp, Artificial Sequence
  Description of Artificial Sequence: Synthetic oligonucleotide
acaatcacaccaagagcagac

SEQ ID NO: 40333 - DNA, 21 bp, Artificial Sequence
  Description of Artificial Sequence: Synthetic oligonucleotide
acaatcacaagcccaaaaatg

SEQ ID NO: 40334 - DNA, 21 bp, Artificial Sequence
  Description of Artificial Sequence: Synthetic oligonucleotide
acaatcacatacgaactcaca

SEQ ID NO: 40335 - DNA, 21 bp, Artificial Sequence
  Description of Artificial Sequence: Synthetic oligonucleotide
acaatcgtcagagaactcaca

SEQ ID NO: 40336 - DNA, 21 bp, Artificial Sequence
  Description of Artificial Sequence: Synthetic oligonucleotide
acaatcgtcagcgacccaaga

SEQ ID NO: 40337 - DNA, 21 bp, Artificial Sequence
  Description of Artificial Sequence: Synthetic oligonucleotide
acaatcgtcagcggagtcgtc

SEQ ID NO: 40338 - DNA, 21 bp, Artificial Sequence
  Description of Artificial Sequence: Synthetic oligonucleotide
acaatcgtcacaggagcaagc

SEQ ID NO: 40339 - DNA, 21 bp, Artificial Sequence
  Description of Artificial Sequence: Synthetic oligonucleotide
acaatctactacgacgtcaca

SEQ ID NO: 40340 - DNA, 21 bp, Artificial Sequence
  Description of Artificial Sequence: Synthetic oligonucleotide
acaaaagcaggaagcttccac

SEQ ID NO: 40341 - DNA, 21 bp, Artificial Sequence
  Description of Artificial Sequence: Synthetic oligonucleotide
acaaaagcacactgctgcgga

SEQ ID NO: 40342 - DNA, 21 bp, Artificial Sequence
  Description of Artificial Sequence: Synthetic oligonucleotide
acaaaagcactcgtccacatg

SEQ ID NO: 40343 - DNA, 21 bp, Artificial Sequence
  Description of Artificial Sequence: Synthetic oligonucleotide
acaaaagaccaagtcagactc

SEQ ID NO: 40344 - DNA, 21 bp, Artificial Sequence
  Description of Artificial Sequence: Synthetic oligonucleotide
acaaaagacagaccattcctc

SEQ ID NO: 40345 - DNA, 21 bp, Artificial Sequence
  Description of Artificial Sequence: Synthetic oligonucleotide
acaaaagaatgcatgctcaca

SEQ ID NO: 40346 - DNA, 21 bp, Artificial Sequence
  Description of Artificial Sequence: Synthetic oligonucleotide
acaaaaggaggattcaacgac

SEQ ID NO: 40347 - DNA, 21 bp, Artificial Sequence
  Description of Artificial Sequence: Synthetic oligonucleotide
acaaaaggaggaaaacaacca

SEQ ID NO: 40348 - DNA, 21 bp, Artificial Sequence
  Description of Artificial Sequence: Synthetic oligonucleotide
acaaaaggaagagaaccagtc

SEQ ID NO: 40349 - DNA, 21 bp, Artificial Sequence
  Description of Artificial Sequence: Synthetic oligonucleotide
acaaaaggagtcccaggatac

SEQ ID NO: 40350 - DNA, 21 bp, Artificial Sequence
  Description of Artificial Sequence: Synthetic oligonucleotide
acaaaacacctcatgccagca

SEQ ID NO: 40351 - DNA, 21 bp, Artificial Sequence
  Description of Artificial Sequence: Synthetic oligonucleotide
acaaaaatcgcaggattcagc

SEQ ID NO: 40352 - DNA, 21 bp, Artificial Sequence
  Description of Artificial Sequence: Synthetic oligonucleotide
acaaaaatcggaagcgcaatg

SEQ ID NO: 40353 - DNA, 21 bp, Artificial Sequence
  Description of Artificial Sequence: Synthetic oligonucleotide
acaaaactcaacgcattcgac

SEQ ID NO: 40354 - DNA, 21 bp, Artificial Sequence
  Description of Artificial Sequence: Synthetic oligonucleotide
acaaaactcccaaacagcagc

SEQ ID NO: 40355 - DNA, 21 bp, Artificial Sequence
  Description of Artificial Sequence: Synthetic oligonucleotide
acaaaactccaagcaagcctc

SEQ ID NO: 40356 - DNA, 21 bp, Artificial Sequence
  Description of Artificial Sequence: Synthetic oligonucleotide
acaaaactcgtcacagaaagc

SEQ ID NO: 40357 - DNA, 21 bp, Artificial Sequence
  Description of Artificial Sequence: Synthetic oligonucleotide
acaaaaatgaacgcaagcgga

SEQ ID NO: 40358 - DNA, 21 bp, Artificial Sequence
  Description of Artificial Sequence: Synthetic oligonucleotide
acaaaaaacctcgaccacaca

SEQ ID NO: 40359 - DNA, 21 bp, Artificial Sequence
  Description of Artificial Sequence: Synthetic oligonucleotide
acaaaaaacctcacagaaaga

SEQ ID NO: 40360 - DNA, 21 bp, Artificial Sequence
  Description of Artificial Sequence: Synthetic oligonucleotide
acaaaaaacagaatggacctc

SEQ ID NO: 40361 - DNA, 21 bp, Artificial Sequence
  Description of Artificial Sequence: Synthetic oligonucleotide
acaaaaccaggaagcatcttc

SEQ ID NO: 40362 - DNA, 21 bp, Artificial Sequence
  Description of Artificial Sequence: Synthetic oligonucleotide
acaaaaccaccagtccaaagc

SEQ ID NO: 40363 - DNA, 21 bp, Artificial Sequence
  Description of Artificial Sequence: Synthetic oligonucleotide
acaaaaccacaaagcagctac

SEQ ID NO: 40364 - DNA, 21 bp, Artificial Sequence
  Description of Artificial Sequence: Synthetic oligonucleotide
acaaaaagagaaagccacagc

SEQ ID NO: 40365 - DNA, 21 bp, Artificial Sequence
  Description of Artificial Sequence: Synthetic oligonucleotide
acaaaaagcgcagcaacagca

SEQ ID NO: 40366 - DNA, 21 bp, Artificial Sequence
  Description of Artificial Sequence: Synthetic oligonucleotide
acaaaaagcggactcacacaa

SEQ ID NO: 40367 - DNA, 21 bp, Artificial Sequence
  Description of Artificial Sequence: Synthetic oligonucleotide
acaaaaagcggaaacagcctc

SEQ ID NO: 40368 - DNA, 21 bp, Artificial Sequence
  Description of Artificial Sequence: Synthetic oligonucleotide
acaaaaagccaaacacacctc

SEQ ID NO: 40369 - DNA, 21 bp, Artificial Sequence
  Description of Artificial Sequence: Synthetic oligonucleotide
acaaaaagcagcgtcctccca

SEQ ID NO: 40370 - DNA, 21 bp, Artificial Sequence
  Description of Artificial Sequence: Synthetic oligonucleotide
acaaaaagctacagcccaaac

SEQ ID NO: 40371 - DNA, 21 bp, Artificial Sequence
  Description of Artificial Sequence: Synthetic oligonucleotide
acaaaaacaggagacggacca

SEQ ID NO: 40372 - DNA, 21 bp, Artificial Sequence
  Description of Artificial Sequence: Synthetic oligonucleotide
acaaaaacaagcttcccaaac

SEQ ID NO: 40373 - DNA, 21 bp, Artificial Sequence
  Description of Artificial Sequence: Synthetic oligonucleotide
acaaaagtcgcactcgaccca

SEQ ID NO: 40374 - DNA, 21 bp, Artificial Sequence
  Description of Artificial Sequence: Synthetic oligonucleotide
acaaaagtcgcaagagaagtc

SEQ ID NO: 40375 - DNA, 21 bp, Artificial Sequence
  Description of Artificial Sequence: Synthetic oligonucleotide
acactcgcactctacgcaagc

SEQ ID NO: 40376 - DNA, 21 bp, Artificial Sequence
  Description of Artificial Sequence: Synthetic oligonucleotide
acactcgcaccaacaacaaaa

SEQ ID NO: 40377 - DNA, 21 bp, Artificial Sequence
  Description of Artificial Sequence: Synthetic oligonucleotide
acactcgcaagcggaagagca

SEQ ID NO: 40378 - DNA, 21 bp, Artificial Sequence
  Description of Artificial Sequence: Synthetic oligonucleotide
acactcgcaagcagaagcgtc

SEQ ID NO: 40379 - DNA, 21 bp, Artificial Sequence
  Description of Artificial Sequence: Synthetic oligonucleotide
acactcgcaacaagcagcaac

SEQ ID NO: 40380 - DNA, 21 bp, Artificial Sequence
  Description of Artificial Sequence: Synthetic oligonucleotide
acactcgcagtcaacagcatg

SEQ ID NO: 40381 - DNA, 21 bp, Artificial Sequence
  Description of Artificial Sequence: Synthetic oligonucleotide
acactcgacatgacaagcgtc

SEQ ID NO: 40382 - DNA, 21 bp, Artificial Sequence
  Description of Artificial Sequence: Synthetic oligonucleotide
acactcgacaacagcagagca

SEQ ID NO: 40383 - DNA, 21 bp, Artificial Sequence
  Description of Artificial Sequence: Synthetic oligonucleotide
acactcgacgtccactacgtc

SEQ ID NO: 40384 - DNA, 21 bp, Artificial Sequence
  Description of Artificial Sequence: Synthetic oligonucleotide
acactcgaagcacaaacagac

SEQ ID NO: 40385 - DNA, 21 bp, Artificial Sequence
  Description of Artificial Sequence: Synthetic oligonucleotide
acactcgaacacacatgcaga

SEQ ID NO: 40386 - DNA, 21 bp, Artificial Sequence
  Description of Artificial Sequence: Synthetic oligonucleotide
acactcgaaccaagaaaagac

SEQ ID NO: 40387 - DNA, 21 bp, Artificial Sequence
  Description of Artificial Sequence: Synthetic oligonucleotide
acactcgaacaattcggaagc

SEQ ID NO: 40388 - DNA, 21 bp, Artificial Sequence
  Description of Artificial Sequence: Synthetic oligonucleotide
acactcgaacaatacaaactc

SEQ ID NO: 40389 - DNA, 21 bp, Artificial Sequence
  Description of Artificial Sequence: Synthetic oligonucleotide
acactcgaaagaaaactcgac

SEQ ID NO: 40390 - DNA, 21 bp, Artificial Sequence
  Description of Artificial Sequence: Synthetic oligonucleotide
acactcgaaagaccattcatc

SEQ ID NO: 40391 - DNA, 21 bp, Artificial Sequence
  Description of Artificial Sequence: Synthetic oligonucleotide
acactcttcaacagcgaaaaa

SEQ ID NO: 40392 - DNA, 21 bp, Artificial Sequence
  Description of Artificial Sequence: Synthetic oligonucleotide
acactcttccaacaaccacca

SEQ ID NO: 40393 - DNA, 21 bp, Artificial Sequence
  Description of Artificial Sequence: Synthetic oligonucleotide
acactcttcagagacggaagc

SEQ ID NO: 40394 - DNA, 21 bp, Artificial Sequence
  Description of Artificial Sequence: Synthetic oligonucleotide
acactcggaggaagcccagtc

SEQ ID NO: 40395 - DNA, 21 bp, Artificial Sequence
  Description of Artificial Sequence: Synthetic oligonucleotide
acactcggaggaagcagagca

SEQ ID NO: 40396 - DNA, 21 bp, Artificial Sequence
  Description of Artificial Sequence: Synthetic oligonucleotide
acactcggacacgcattcgca

SEQ ID NO: 40397 - DNA, 21 bp, Artificial Sequence
  Description of Artificial Sequence: Synthetic oligonucleotide
acactcggacacgtcccacca

SEQ ID NO: 40398 - DNA, 21 bp, Artificial Sequence
  Description of Artificial Sequence: Synthetic oligonucleotide
acactcggaatcacagcacac

SEQ ID NO: 40399 - DNA, 21 bp, Artificial Sequence
  Description of Artificial Sequence: Synthetic oligonucleotide
acactcggaatcgtcacacaa

SEQ ID NO: 40400 - DNA, 21 bp, Artificial Sequence
  Description of Artificial Sequence: Synthetic oligonucleotide
acactcggactcacaatgcca

SEQ ID NO: 40401 - DNA, 21 bp, Artificial Sequence
  Description of Artificial Sequence: Synthetic oligonucleotide
acactcggaccaaacagcaga

SEQ ID NO: 40402 - DNA, 21 bp, Artificial Sequence
  Description of Artificial Sequence: Synthetic oligonucleotide
acactcggacaaacaacagga

SEQ ID NO: 40403 - DNA, 21 bp, Artificial Sequence
  Description of Artificial Sequence: Synthetic oligonucleotide
acactccaccaaatcccagca

SEQ ID NO: 40404 - DNA, 21 bp, Artificial Sequence
  Description of Artificial Sequence: Synthetic oligonucleotide
acactccacagcagcagcagc

SEQ ID NO: 40405 - DNA, 21 bp, Artificial Sequence
  Description of Artificial Sequence: Synthetic oligonucleotide
acactcatcggaaacgacaca

SEQ ID NO: 40406 - DNA, 21 bp, Artificial Sequence
  Description of Artificial Sequence: Synthetic oligonucleotide
acactcatcagcagcgtcaca

SEQ ID NO: 40407 - DNA, 21 bp, Artificial Sequence
  Description of Artificial Sequence: Synthetic oligonucleotide
acactcaaagcagaagacctc

SEQ ID NO: 40408 - DNA, 21 bp, Artificial Sequence
  Description of Artificial Sequence: Synthetic oligonucleotide
acactcaaaggaccaggacaa

SEQ ID NO: 40409 - DNA, 21 bp, Artificial Sequence
  Description of Artificial Sequence: Synthetic oligonucleotide
acactcaaaagaggactcgac

SEQ ID NO: 40410 - DNA, 21 bp, Artificial Sequence
  Description of Artificial Sequence: Synthetic oligonucleotide
acactcaaaagcaacgcaaaa

SEQ ID NO: 40411 - DNA, 21 bp, Artificial Sequence
  Description of Artificial Sequence: Synthetic oligonucleotide
acactcctcccagcaagccca

SEQ ID NO: 40412 - DNA, 21 bp, Artificial Sequence
  Description of Artificial Sequence: Synthetic oligonucleotide
acactcctcccaggagaccca

SEQ ID NO: 40413 - DNA, 21 bp, Artificial Sequence
  Description of Artificial Sequence: Synthetic oligonucleotide
acactcctcccacacccaaca

SEQ ID NO: 40414 - DNA, 21 bp, Artificial Sequence
  Description of Artificial Sequence: Synthetic oligonucleotide
acactcctcacagacgacctc

SEQ ID NO: 40415 - DNA, 21 bp, Artificial Sequence
  Description of Artificial Sequence: Synthetic oligonucleotide
acactcatgcaagtcagcgga

SEQ ID NO: 40416 - DNA, 21 bp, Artificial Sequence
  Description of Artificial Sequence: Synthetic oligonucleotide
acactcatgagaggagcaagc

SEQ ID NO: 40417 - DNA, 21 bp, Artificial Sequence
  Description of Artificial Sequence: Synthetic oligonucleotide
acactcaacagcgcaaaaaaa

SEQ ID NO: 40418 - DNA, 21 bp, Artificial Sequence
  Description of Artificial Sequence: Synthetic oligonucleotide
acactcaacagcgaaagaatg

SEQ ID NO: 40419 - DNA, 21 bp, Artificial Sequence
  Description of Artificial Sequence: Synthetic oligonucleotide
acactcccacacagagtcgca

SEQ ID NO: 40420 - DNA, 21 bp, Artificial Sequence
  Description of Artificial Sequence: Synthetic oligonucleotide
acactcccacacagcccaaaa

SEQ ID NO: 40421 - DNA, 21 bp, Artificial Sequence
  Description of Artificial Sequence: Synthetic oligonucleotide
acactcccaaaaacaaacctc

SEQ ID NO: 40422 - DNA, 21 bp, Artificial Sequence
  Description of Artificial Sequence: Synthetic oligonucleotide
acactcccactcacaagcaca

SEQ ID NO: 40423 - DNA, 21 bp, Artificial Sequence
  Description of Artificial Sequence: Synthetic oligonucleotide
acactcccaaactacctcgca

SEQ ID NO: 40424 - DNA, 21 bp, Artificial Sequence
  Description of Artificial Sequence: Synthetic oligonucleotide
acactcccaccaaacagccca

SEQ ID NO: 40425 - DNA, 21 bp, Artificial Sequence
  Description of Artificial Sequence: Synthetic oligonucleotide
acactcccaagcgaaagagtc

SEQ ID NO: 40426 - DNA, 21 bp, Artificial Sequence
  Description of Artificial Sequence: Synthetic oligonucleotide
acactcccaacaacactcgtc

SEQ ID NO: 40427 - DNA, 21 bp, Artificial Sequence
  Description of Artificial Sequence: Synthetic oligonucleotide
acactcccagtcaacaacctc

SEQ ID NO: 40428 - DNA, 21 bp, Artificial Sequence
  Description of Artificial Sequence: Synthetic oligonucleotide
acactccaagacaacagagca

SEQ ID NO: 40429 - DNA, 21 bp, Artificial Sequence
  Description of Artificial Sequence: Synthetic oligonucleotide
acactccaagaaggaacagga

SEQ ID NO: 40430 - DNA, 21 bp, Artificial Sequence
  Description of Artificial Sequence: Synthetic oligonucleotide
acactccaattcggagcagga

SEQ ID NO: 40431 - DNA, 21 bp, Artificial Sequence
  Description of Artificial Sequence: Synthetic oligonucleotide
acactccaaggaggaagcctc

SEQ ID NO: 40432 - DNA, 21 bp, Artificial Sequence
  Description of Artificial Sequence: Synthetic oligonucleotide
acactccaaccactcagaatc

SEQ ID NO: 40433 - DNA, 21 bp, Artificial Sequence
  Description of Artificial Sequence: Synthetic oligonucleotide
acactcagagacacagcagac

SEQ ID NO: 40434 - DNA, 21 bp, Artificial Sequence
  Description of Artificial Sequence: Synthetic oligonucleotide
acactcagagaaagcgacaca

SEQ ID NO: 40435 - DNA, 21 bp, Artificial Sequence
  Description of Artificial Sequence: Synthetic oligonucleotide
acactcagaggagcagaagac

SEQ ID NO: 40436 - DNA, 21 bp, Artificial Sequence
  Description of Artificial Sequence: Synthetic oligonucleotide
acactcagactcacagcagga

SEQ ID NO: 40437 - DNA, 21 bp, Artificial Sequence
  Description of Artificial Sequence: Synthetic oligonucleotide
acactcagaatgcaactcaac

SEQ ID NO: 40438 - DNA, 21 bp, Artificial Sequence
  Description of Artificial Sequence: Synthetic oligonucleotide
acactcagaaacagcccagca

SEQ ID NO: 40439 - DNA, 21 bp, Artificial Sequence
  Description of Artificial Sequence: Synthetic oligonucleotide
acactcagaccactccaagca

SEQ ID NO: 40440 - DNA, 21 bp, Artificial Sequence
  Description of Artificial Sequence: Synthetic oligonucleotide
acactcagaagcgcaggacca

SEQ ID NO: 40441 - DNA, 21 bp, Artificial Sequence
  Description of Artificial Sequence: Synthetic oligonucleotide
acactcagaacactcgcagaa

SEQ ID NO: 40442 - DNA, 21 bp, Artificial Sequence
  Description of Artificial Sequence: Synthetic oligonucleotide
acactcagcgcactcccacca

SEQ ID NO: 40443 - DNA, 21 bp, Artificial Sequence
  Description of Artificial Sequence: Synthetic oligonucleotide
acactcagcgacagaccacca

SEQ ID NO: 40444 - DNA, 21 bp, Artificial Sequence
  Description of Artificial Sequence: Synthetic oligonucleotide
acactcagcgacagcgtcgac

SEQ ID NO: 40445 - DNA, 21 bp, Artificial Sequence
  Description of Artificial Sequence: Synthetic oligonucleotide
acactcagcgaaaacctccca

SEQ ID NO: 40446 - DNA, 21 bp, Artificial Sequence
  Description of Artificial Sequence: Synthetic oligonucleotide
acactcagccacctcccatac

SEQ ID NO: 40447 - DNA, 21 bp, Artificial Sequence
  Description of Artificial Sequence: Synthetic oligonucleotide
acactcagccacaacgcacca

SEQ ID NO: 40448 - DNA, 21 bp, Artificial Sequence
  Description of Artificial Sequence: Synthetic oligonucleotide
acactcagccacagactccca

SEQ ID NO: 40449 - DNA, 21 bp, Artificial Sequence
  Description of Artificial Sequence: Synthetic oligonucleotide
acactcagcaaacacctcctc

SEQ ID NO: 40450 - DNA, 21 bp, Artificial Sequence
  Description of Artificial Sequence: Synthetic oligonucleotide
acactcagcaaaccaccaagc

SEQ ID NO: 40451 - DNA, 21 bp, Artificial Sequence
  Description of Artificial Sequence: Synthetic oligonucleotide
acactcagcctcagcgcaatc

SEQ ID NO: 40452 - DNA, 21 bp, Artificial Sequence
  Description of Artificial Sequence: Synthetic oligonucleotide
acactcagcctcagcaacaac

SEQ ID NO: 40453 - DNA, 21 bp, Artificial Sequence
  Description of Artificial Sequence: Synthetic oligonucleotide
acactcagcctcagcacagga

SEQ ID NO: 40454 - DNA, 21 bp, Artificial Sequence
  Description of Artificial Sequence: Synthetic oligonucleotide
acactcagcaacagcgtccca

SEQ ID NO: 40455 - DNA, 21 bp, Artificial Sequence
  Description of Artificial Sequence: Synthetic oligonucleotide
acactcagcccaaaaagcgtc

SEQ ID NO: 40456 - DNA, 21 bp, Artificial Sequence
  Description of Artificial Sequence: Synthetic oligonucleotide
acactcagcccaagcggaagc

SEQ ID NO: 40457 - DNA, 21 bp, Artificial Sequence
  Description of Artificial Sequence: Synthetic oligonucleotide
acactcagcccaacaacaagc

SEQ ID NO: 40458 - DNA, 21 bp, Artificial Sequence
  Description of Artificial Sequence: Synthetic oligonucleotide
acactcagccaaagaccacca

SEQ ID NO: 40459 - DNA, 21 bp, Artificial Sequence
  Description of Artificial Sequence: Synthetic oligonucleotide
acactcagccaaagcacacac

SEQ ID NO: 40460 - DNA, 21 bp, Artificial Sequence
  Description of Artificial Sequence: Synthetic oligonucleotide
acactcagcagaacactcgaa

SEQ ID NO: 40461 - DNA, 21 bp, Artificial Sequence
  Description of Artificial Sequence: Synthetic oligonucleotide
acactcagcagcggacaaaca

SEQ ID NO: 40462 - DNA, 21 bp, Artificial Sequence
  Description of Artificial Sequence: Synthetic oligonucleotide
acactcagcagcagaccaatg

SEQ ID NO: 40463 - DNA, 21 bp, Artificial Sequence
  Description of Artificial Sequence: Synthetic oligonucleotide
acactcagcagcagacaaagc

SEQ ID NO: 40464 - DNA, 21 bp, Artificial Sequence
  Description of Artificial Sequence: Synthetic oligonucleotide
acactcagcacagtcagcctc

SEQ ID NO: 40465 - DNA, 21 bp, Artificial Sequence
  Description of Artificial Sequence: Synthetic oligonucleotide
acactcagctacacaccagca

SEQ ID NO: 40466 - DNA, 21 bp, Artificial Sequence
  Description of Artificial Sequence: Synthetic oligonucleotide
acactcacattcagaggagac

SEQ ID NO: 40467 - DNA, 21 bp, Artificial Sequence
  Description of Artificial Sequence: Synthetic oligonucleotide
acactcacaaaaaacagcaca

SEQ ID NO: 40468 - DNA, 21 bp, Artificial Sequence
  Description of Artificial Sequence: Synthetic oligonucleotide
acactcacaccactctacgaa

SEQ ID NO: 40469 - DNA, 21 bp, Artificial Sequence
  Description of Artificial Sequence: Synthetic oligonucleotide
acactcacaccaaacgaaagc

SEQ ID NO: 40470 - DNA, 21 bp, Artificial Sequence
  Description of Artificial Sequence: Synthetic oligonucleotide
acactcacaagactcagccca

SEQ ID NO: 40471 - DNA, 21 bp, Artificial Sequence
  Description of Artificial Sequence: Synthetic oligonucleotide
acactcacaagaatgaacgtc

SEQ ID NO: 40472 - DNA, 21 bp, Artificial Sequence
  Description of Artificial Sequence: Synthetic oligonucleotide
acactcacaacaaacgtcagc

SEQ ID NO: 40473 - DNA, 21 bp, Artificial Sequence
  Description of Artificial Sequence: Synthetic oligonucleotide
acactcacaacaccaatgaac

SEQ ID NO: 40474 - DNA, 21 bp, Artificial Sequence
  Description of Artificial Sequence: Synthetic oligonucleotide
acactcacagtcctcgaccca

SEQ ID NO: 40475 - DNA, 21 bp, Artificial Sequence
  Description of Artificial Sequence: Synthetic oligonucleotide
acactcacataccacagagac

SEQ ID NO: 40476 - DNA, 21 bp, Artificial Sequence
  Description of Artificial Sequence: Synthetic oligonucleotide
acactcgtcggacactactac

SEQ ID NO: 40477 - DNA, 21 bp, Artificial Sequence
  Description of Artificial Sequence: Synthetic oligonucleotide
acactcgtcggaccagcaagc

SEQ ID NO: 40478 - DNA, 21 bp, Artificial Sequence
  Description of Artificial Sequence: Synthetic oligonucleotide
acactcgtcccaagagacctc

SEQ ID NO: 40479 - DNA, 21 bp, Artificial Sequence
  Description of Artificial Sequence: Synthetic oligonucleotide
acactcgtccaagcagaaatg

SEQ ID NO: 40480 - DNA, 21 bp, Artificial Sequence
  Description of Artificial Sequence: Synthetic oligonucleotide
acactcgtcacaagagaaaac

SEQ ID NO: 40481 - DNA, 21 bp, Artificial Sequence
  Description of Artificial Sequence: Synthetic oligonucleotide
acactcgtcgtcagaagccca

SEQ ID NO: 40482 - DNA, 21 bp, Artificial Sequence
  Description of Artificial Sequence: Synthetic oligonucleotide
acactctacggacacccaagc

SEQ ID NO: 40483 - DNA, 21 bp, Artificial Sequence
  Description of Artificial Sequence: Synthetic oligonucleotide
acactctacctccacagcgaa

SEQ ID NO: 40484 - DNA, 21 bp, Artificial Sequence
  Description of Artificial Sequence: Synthetic oligonucleotide
acactctacaacacaacaatg

SEQ ID NO: 40485 - DNA, 21 bp, Artificial Sequence
  Description of Artificial Sequence: Synthetic oligonucleotide
acactctacagagtcaaccca

SEQ ID NO: 40486 - DNA, 21 bp, Artificial Sequence
  Description of Artificial Sequence: Synthetic oligonucleotide
acactctacagccaaagcgaa

SEQ ID NO: 40487 - DNA, 21 bp, Artificial Sequence
  Description of Artificial Sequence: Synthetic oligonucleotide
acactctacacaaacagcgtc

SEQ ID NO: 40488 - DNA, 21 bp, Artificial Sequence
  Description of Artificial Sequence: Synthetic oligonucleotide
acaatggcaatgaacccaaga

SEQ ID NO: 40489 - DNA, 21 bp, Artificial Sequence
  Description of Artificial Sequence: Synthetic oligonucleotide
acaatggcaccaagagacctc

SEQ ID NO: 40490 - DNA, 21 bp, Artificial Sequence
  Description of Artificial Sequence: Synthetic oligonucleotide
acaatggacaacctcagacaa

SEQ ID NO: 40491 - DNA, 21 bp, Artificial Sequence
  Description of Artificial Sequence: Synthetic oligonucleotide
acaatggacagaacaccagga

SEQ ID NO: 40492 - DNA, 21 bp, Artificial Sequence
  Description of Artificial Sequence: Synthetic oligonucleotide
acaatggacgtcctcagcttc

SEQ ID NO: 40493 - DNA, 21 bp, Artificial Sequence
  Description of Artificial Sequence: Synthetic oligonucleotide
acaatggaaagaggagacagc

SEQ ID NO: 40494 - DNA, 21 bp, Artificial Sequence
  Description of Artificial Sequence: Synthetic oligonucleotide
acaatgcacgcacacccactc

SEQ ID NO: 40495 - DNA, 21 bp, Artificial Sequence
  Description of Artificial Sequence: Synthetic oligonucleotide
acaatgctcacaagaacagga

SEQ ID NO: 40496 - DNA, 21 bp, Artificial Sequence
  Description of Artificial Sequence: Synthetic oligonucleotide
acaatgatgaaaccactcgac

SEQ ID NO: 40497 - DNA, 21 bp, Artificial Sequence
  Description of Artificial Sequence: Synthetic oligonucleotide
acaatgaacaaaccaacactc

SEQ ID NO: 40498 - DNA, 21 bp, Artificial Sequence
  Description of Artificial Sequence: Synthetic oligonucleotide
acaatgaacctcggagaaatg

SEQ ID NO: 40499 - DNA, 21 bp, Artificial Sequence
  Description of Artificial Sequence: Synthetic oligonucleotide
acaatgaacccaacacaaaac

SEQ ID NO: 40500 - DNA, 21 bp, Artificial Sequence
  Description of Artificial Sequence: Synthetic oligonucleotide
acaatgaacacactcgtcaca

SEQ ID NO: 40501 - DNA, 21 bp, Artificial Sequence
  Description of Artificial Sequence: Synthetic oligonucleotide
acaatgccaaaccacggacca

SEQ ID NO: 40502 - DNA, 21 bp, Artificial Sequence
  Description of Artificial Sequence: Synthetic oligonucleotide
acaatgccaagcgaaagcgtc

SEQ ID NO: 40503 - DNA, 21 bp, Artificial Sequence
  Description of Artificial Sequence: Synthetic oligonucleotide
acaatgcaagcaccaagcgca

SEQ ID NO: 40504 - DNA, 21 bp, Artificial Sequence
  Description of Artificial Sequence: Synthetic oligonucleotide
acaatgcaatacggaagcaca

SEQ ID NO: 40505 - DNA, 21 bp, Artificial Sequence
  Description of Artificial Sequence: Synthetic oligonucleotide
acaatgagagaaggaccagca

SEQ ID NO: 40506 - DNA, 21 bp, Artificial Sequence
  Description of Artificial Sequence: Synthetic oligonucleotide
acaatgagaatcgacctccca

SEQ ID NO: 40507 - DNA, 21 bp, Artificial Sequence
  Description of Artificial Sequence: Synthetic oligonucleotide
acaatgagaagcagcgaaatc

SEQ ID NO: 40508 - DNA, 21 bp, Artificial Sequence
  Description of Artificial Sequence: Synthetic oligonucleotide
acaatgagaacaaacccagac

SEQ ID NO: 40509 - DNA, 21 bp, Artificial Sequence
  Description of Artificial Sequence: Synthetic oligonucleotide
acaatgagcggaacaagcaga

SEQ ID NO: 40510 - DNA, 21 bp, Artificial Sequence
  Description of Artificial Sequence: Synthetic oligonucleotide
acaatgagcatcgcactcgca

SEQ ID NO: 40511 - DNA, 21 bp, Artificial Sequence
  Description of Artificial Sequence: Synthetic oligonucleotide
acaatgagcaaaccaagctac

SEQ ID NO: 40512 - DNA, 21 bp, Artificial Sequence
  Description of Artificial Sequence: Synthetic oligonucleotide
acaatgagcatgagcatcaca

SEQ ID NO: 40513 - DNA, 21 bp, Artificial Sequence
  Description of Artificial Sequence: Synthetic oligonucleotide
acaatgagcccaggaaacaac

SEQ ID NO: 40514 - DNA, 21 bp, Artificial Sequence
  Description of Artificial Sequence: Synthetic oligonucleotide
acaatgagcccacacagccca

SEQ ID NO: 40515 - DNA, 21 bp, Artificial Sequence
  Description of Artificial Sequence: Synthetic oligonucleotide
acaatgagcccactcaacaga

SEQ ID NO: 40516 - DNA, 21 bp, Artificial Sequence
  Description of Artificial Sequence: Synthetic oligonucleotide
acaatgacacaccaccaattc

SEQ ID NO: 40517 - DNA, 21 bp, Artificial Sequence
  Description of Artificial Sequence: Synthetic oligonucleotide
acaatgacaagaagcatgctc

SEQ ID NO: 40518 - DNA, 21 bp, Artificial Sequence
  Description of Artificial Sequence: Synthetic oligonucleotide
acaatgacagtcctcacaatg

SEQ ID NO: 40519 - DNA, 21 bp, Artificial Sequence
  Description of Artificial Sequence: Synthetic oligonucleotide
acaatggtcgcaagcatggca

SEQ ID NO: 40520 - DNA, 21 bp, Artificial Sequence
  Description of Artificial Sequence: Synthetic oligonucleotide
acaatggtcaaacaaggaaac

SEQ ID NO: 40521 - DNA, 21 bp, Artificial Sequence
  Description of Artificial Sequence: Synthetic oligonucleotide
acaatggtcagcggaggacac

SEQ ID NO: 40522 - DNA, 21 bp, Artificial Sequence
  Description of Artificial Sequence: Synthetic oligonucleotide
acaatggtcgtcgtcagcagc

SEQ ID NO: 40523 - DNA, 21 bp, Artificial Sequence
  Description of Artificial Sequence: Synthetic oligonucleotide
acaatggtctacacagacaac

SEQ ID NO: 40524 - DNA, 21 bp, Artificial Sequence
  Description of Artificial Sequence: Synthetic oligonucleotide
acaaacgcagcactccaaagc

SEQ ID NO: 40525 - DNA, 21 bp, Artificial Sequence
  Description of Artificial Sequence: Synthetic oligonucleotide
acaaacgcaatcaaaagcgga

SEQ ID NO: 40526 - DNA, 21 bp, Artificial Sequence
  Description of Artificial Sequence: Synthetic oligonucleotide
acaaacgcaagctggccacca

SEQ ID NO: 40527 - DNA, 21 bp, Artificial Sequence
  Description of Artificial Sequence: Synthetic oligonucleotide
acaaacgacccaatgatgcca

SEQ ID NO: 40528 - DNA, 21 bp, Artificial Sequence
  Description of Artificial Sequence: Synthetic oligonucleotide
acaaacgaacacaaattcagc

SEQ ID NO: 40529 - DNA, 21 bp, Artificial Sequence
  Description of Artificial Sequence: Synthetic oligonucleotide
acaaacgaaagcagcggaaca

SEQ ID NO: 40530 - DNA, 21 bp, Artificial Sequence
  Description of Artificial Sequence: Synthetic oligonucleotide
acaaacttcctcccacacgga

SEQ ID NO: 40531 - DNA, 21 bp, Artificial Sequence
  Description of Artificial Sequence: Synthetic oligonucleotide
acaaacttcccacaaagcgca

SEQ ID NO: 40532 - DNA, 21 bp, Artificial Sequence
  Description of Artificial Sequence: Synthetic oligonucleotide
acaaacttccaactcacagtc

SEQ ID NO: 40533 - DNA, 21 bp, Artificial Sequence
  Description of Artificial Sequence: Synthetic oligonucleotide
acaaacggaagagtcacagca

SEQ ID NO: 40534 - DNA, 21 bp, Artificial Sequence
  Description of Artificial Sequence: Synthetic oligonucleotide
acaaacggaacaaaaccaaca

SEQ ID NO: 40535 - DNA, 21 bp, Artificial Sequence
  Description of Artificial Sequence: Synthetic oligonucleotide
acaaacggagtcaaactcagc

SEQ ID NO: 40536 - DNA, 21 bp, Artificial Sequence
  Description of Artificial Sequence: Synthetic oligonucleotide
acaaaccacatcgcagcactc

SEQ ID NO: 40537 - DNA, 21 bp, Artificial Sequence
  Description of Artificial Sequence: Synthetic oligonucleotide
acaaaccacagcagcccactc

SEQ ID NO: 40538 - DNA, 21 bp, Artificial Sequence
  Description of Artificial Sequence: Synthetic oligonucleotide
acaaacaaaacagtcggatgc

SEQ ID NO: 40539 - DNA, 21 bp, Artificial Sequence
  Description of Artificial Sequence: Synthetic oligonucleotide
acaaacctcgcagcaagacca

SEQ ID NO: 40540 - DNA, 21 bp, Artificial Sequence
  Description of Artificial Sequence: Synthetic oligonucleotide
acaaacctcaaaagaatggac

SEQ ID NO: 40541 - DNA, 21 bp, Artificial Sequence
  Description of Artificial Sequence: Synthetic oligonucleotide
acaaacctcaacggaaacgac

SEQ ID NO: 40542 - DNA, 21 bp, Artificial Sequence
  Description of Artificial Sequence: Synthetic oligonucleotide
acaaacctcaacacaagacca

SEQ ID NO: 40543 - DNA, 21 bp, Artificial Sequence
  Description of Artificial Sequence: Synthetic oligonucleotide
acaaacctcagaagcgaactc

SEQ ID NO: 40544 - DNA, 21 bp, Artificial Sequence
  Description of Artificial Sequence: Synthetic oligonucleotide
acaaacctcagaacagcagtc

SEQ ID NO: 40545 - DNA, 21 bp, Artificial Sequence
  Description of Artificial Sequence: Synthetic oligonucleotide
acaaacatgaaaacagacagc

SEQ ID NO: 40546 - DNA, 21 bp, Artificial Sequence
  Description of Artificial Sequence: Synthetic oligonucleotide
acaaacatgccaatgaaccca

SEQ ID NO: 40547 - DNA, 21 bp, Artificial Sequence
  Description of Artificial Sequence: Synthetic oligonucleotide
acaaacatgccaccactccca

SEQ ID NO: 40548 - DNA, 21 bp, Artificial Sequence
  Description of Artificial Sequence: Synthetic oligonucleotide
acaaacatgccaccactcaca

SEQ ID NO: 40549 - DNA, 21 bp, Artificial Sequence
  Description of Artificial Sequence: Synthetic oligonucleotide
acaaacaacggaggaatgtac

SEQ ID NO: 40550 - DNA, 21 bp, Artificial Sequence
  Description of Artificial Sequence: Synthetic oligonucleotide
acaaacaacagcacaaaccca

SEQ ID NO: 40551 - DNA, 21 bp, Artificial Sequence
  Description of Artificial Sequence: Synthetic oligonucleotide
acaaacccagcaccaaacagc

SEQ ID NO: 40552 - DNA, 21 bp, Artificial Sequence
  Description of Artificial Sequence: Synthetic oligonucleotide
acaaacccaggaccactcgac

SEQ ID NO: 40553 - DNA, 21 bp, Artificial Sequence
  Description of Artificial Sequence: Synthetic oligonucleotide
acaaacccacacagagacaca

SEQ ID NO: 40554 - DNA, 21 bp, Artificial Sequence
  Description of Artificial Sequence: Synthetic oligonucleotide
acaaacccactcagcacagga

SEQ ID NO: 40555 - DNA, 21 bp, Artificial Sequence
  Description of Artificial Sequence: Synthetic oligonucleotide
acaaacccaaacaacgcaaac

SEQ ID NO: 40556 - DNA, 21 bp, Artificial Sequence
  Description of Artificial Sequence: Synthetic oligonucleotide
acaaacccaagaagctacaca

SEQ ID NO: 40557 - DNA, 21 bp, Artificial Sequence
  Description of Artificial Sequence: Synthetic oligonucleotide
acaaacccaagcgcactcgga

SEQ ID NO: 40558 - DNA, 21 bp, Artificial Sequence
  Description of Artificial Sequence: Synthetic oligonucleotide
acaaacccaagcatgtgcctc

SEQ ID NO: 40559 - DNA, 21 bp, Artificial Sequence
  Description of Artificial Sequence: Synthetic oligonucleotide
acaaacccaacaagcatggca

SEQ ID NO: 40560 - DNA, 21 bp, Artificial Sequence
  Description of Artificial Sequence: Synthetic oligonucleotide
acaaacccagtcctcacagaa

SEQ ID NO: 40561 - DNA, 21 bp, Artificial Sequence
  Description of Artificial Sequence: Synthetic oligonucleotide
acaaacccagtcagactcgtc

SEQ ID NO: 40562 - DNA, 21 bp, Artificial Sequence
  Description of Artificial Sequence: Synthetic oligonucleotide
acaaacccagtcagaacaagc

SEQ ID NO: 40563 - DNA, 21 bp, Artificial Sequence
  Description of Artificial Sequence: Synthetic oligonucleotide
acaaacagaggatggacagac

SEQ ID NO: 40564 - DNA, 21 bp, Artificial Sequence
  Description of Artificial Sequence: Synthetic oligonucleotide
acaaacagaaacagcgaagtc

SEQ ID NO: 40565 - DNA, 21 bp, Artificial Sequence
  Description of Artificial Sequence: Synthetic oligonucleotide
acaaacagaccaatcgacaca

SEQ ID NO: 40566 - DNA, 21 bp, Artificial Sequence
  Description of Artificial Sequence: Synthetic oligonucleotide
acaaacagacaagcaagcaca

SEQ ID NO: 40567 - DNA, 21 bp, Artificial Sequence
  Description of Artificial Sequence: Synthetic oligonucleotide
acaaacagacaagacacaaga

SEQ ID NO: 40568 - DNA, 21 bp, Artificial Sequence
  Description of Artificial Sequence: Synthetic oligonucleotide
acaaacagcgcaatcagcgga

SEQ ID NO: 40569 - DNA, 21 bp, Artificial Sequence
  Description of Artificial Sequence: Synthetic oligonucleotide
acaaacagcggaagcgacgca

SEQ ID NO: 40570 - DNA, 21 bp, Artificial Sequence
  Description of Artificial Sequence: Synthetic oligonucleotide
acaaacagccacgcaatgctc

SEQ ID NO: 40571 - DNA, 21 bp, Artificial Sequence
  Description of Artificial Sequence: Synthetic oligonucleotide
acaaacagcctcccagcactc

SEQ ID NO: 40572 - DNA, 21 bp, Artificial Sequence
  Description of Artificial Sequence: Synthetic oligonucleotide
acaaacagcatgggagtccca

SEQ ID NO: 40573 - DNA, 21 bp, Artificial Sequence
  Description of Artificial Sequence: Synthetic oligonucleotide
acaaacagcaaccacacatac

SEQ ID NO: 40574 - DNA, 21 bp, Artificial Sequence
  Description of Artificial Sequence: Synthetic oligonucleotide
acaaacagcccaagcagaagc

SEQ ID NO: 40575 - DNA, 21 bp, Artificial Sequence
  Description of Artificial Sequence: Synthetic oligonucleotide
acaaacacagacgtcacaaaa

SEQ ID NO: 40576 - DNA, 21 bp, Artificial Sequence
  Description of Artificial Sequence: Synthetic oligonucleotide
acaaacacaagaacaccatac

SEQ ID NO: 40577 - DNA, 21 bp, Artificial Sequence
  Description of Artificial Sequence: Synthetic oligonucleotide
acaaacacaagcgcaagcaga

SEQ ID NO: 40578 - DNA, 21 bp, Artificial Sequence
  Description of Artificial Sequence: Synthetic oligonucleotide
acaaacacaagcagcacatac

SEQ ID NO: 40579 - DNA, 21 bp, Artificial Sequence
  Description of Artificial Sequence: Synthetic oligonucleotide
acaaacacaacaatcaacctc

SEQ ID NO: 40580 - DNA, 21 bp, Artificial Sequence
  Description of Artificial Sequence: Synthetic oligonucleotide
acaaacacagtcagaaacttc

SEQ ID NO: 40581 - DNA, 21 bp, Artificial Sequence
  Description of Artificial Sequence: Synthetic oligonucleotide
acaaacgtcatgaaagcagga

SEQ ID NO: 40582 - DNA, 21 bp, Artificial Sequence
  Description of Artificial Sequence: Synthetic oligonucleotide
acaaactacaacgtcggaagc

SEQ ID NO: 40583 - DNA, 21 bp, Artificial Sequence
  Description of Artificial Sequence: Synthetic oligonucleotide
acaaactacgtcctcgcacca

SEQ ID NO: 40584 - DNA, 21 bp, Artificial Sequence
  Description of Artificial Sequence: Synthetic oligonucleotide
acaccagcattcaaaatccaa

SEQ ID NO: 40585 - DNA, 21 bp, Artificial Sequence
  Description of Artificial Sequence: Synthetic oligonucleotide
acaccagcaatcgtcccaaca

SEQ ID NO: 40586 - DNA, 21 bp, Artificial Sequence
  Description of Artificial Sequence: Synthetic oligonucleotide
acaccagcactcaacagacca

SEQ ID NO: 40587 - DNA, 21 bp, Artificial Sequence
  Description of Artificial Sequence: Synthetic oligonucleotide
acaccagcaaacgacccaaga

SEQ ID NO: 40588 - DNA, 21 bp, Artificial Sequence
  Description of Artificial Sequence: Synthetic oligonucleotide
acaccagcaccaaacagattc

SEQ ID NO: 40589 - DNA, 21 bp, Artificial Sequence
  Description of Artificial Sequence: Synthetic oligonucleotide
acaccagcaagcccaagcgac

SEQ ID NO: 40590 - DNA, 21 bp, Artificial Sequence
  Description of Artificial Sequence: Synthetic oligonucleotide
acaccagcaacactcccaagc

SEQ ID NO: 40591 - DNA, 21 bp, Artificial Sequence
  Description of Artificial Sequence: Synthetic oligonucleotide
acaccagcagtcgaaaaactc

SEQ ID NO: 40592 - DNA, 21 bp, Artificial Sequence
  Description of Artificial Sequence: Synthetic oligonucleotide
acaccagcatacggaagaatc

SEQ ID NO: 40593 - DNA, 21 bp, Artificial Sequence
  Description of Artificial Sequence: Synthetic oligonucleotide
acaccagacatgccattcaca

SEQ ID NO: 40594 - DNA, 21 bp, Artificial Sequence
  Description of Artificial Sequence: Synthetic oligonucleotide
acaccagaccaatacgaattc

SEQ ID NO: 40595 - DNA, 21 bp, Artificial Sequence
  Description of Artificial Sequence: Synthetic oligonucleotide
acaccagacagcatgacagca

SEQ ID NO: 40596 - DNA, 21 bp, Artificial Sequence
  Description of Artificial Sequence: Synthetic oligonucleotide
acaccagaaatgaaaagcaac

SEQ ID NO: 40597 - DNA, 21 bp, Artificial Sequence
  Description of Artificial Sequence: Synthetic oligonucleotide
acaccagaaagagcaatgagc

SEQ ID NO: 40598 - DNA, 21 bp, Artificial Sequence
  Description of Artificial Sequence: Synthetic oligonucleotide
acaccagaaacaaacagacca

SEQ ID NO: 40599 - DNA, 21 bp, Artificial Sequence
  Description of Artificial Sequence: Synthetic oligonucleotide
acaccaggaggagcaagacca

SEQ ID NO: 40600 - DNA, 21 bp, Artificial Sequence
  Description of Artificial Sequence: Synthetic oligonucleotide
acaccaggacacatggacagc

SEQ ID NO: 40601 - DNA, 21 bp, Artificial Sequence
  Description of Artificial Sequence: Synthetic oligonucleotide
acaccaggaatcccaagatgc

SEQ ID NO: 40602 - DNA, 21 bp, Artificial Sequence
  Description of Artificial Sequence: Synthetic oligonucleotide
acaccaggaagacaattccca

SEQ ID NO: 40603 - DNA, 21 bp, Artificial Sequence
  Description of Artificial Sequence: Synthetic oligonucleotide
acaccaggaacaatcaacgga

SEQ ID NO: 40604 - DNA, 21 bp, Artificial Sequence
  Description of Artificial Sequence: Synthetic oligonucleotide
acaccacacggagtcagccca

SEQ ID NO: 40605 - DNA, 21 bp, Artificial Sequence
  Description of Artificial Sequence: Synthetic oligonucleotide
acaccacacctcgacggacac

SEQ ID NO: 40606 - DNA, 21 bp, Artificial Sequence
  Description of Artificial Sequence: Synthetic oligonucleotide
acaccacacacaggaaaccaa

SEQ ID NO: 40607 - DNA, 21 bp, Artificial Sequence
  Description of Artificial Sequence: Synthetic oligonucleotide
acaccacacacactcgaagtc

SEQ ID NO: 40608 - DNA, 21 bp, Artificial Sequence
  Description of Artificial Sequence: Synthetic oligonucleotide
acaccaatcggactcccaagc

SEQ ID NO: 40609 - DNA, 21 bp, Artificial Sequence
  Description of Artificial Sequence: Synthetic oligonucleotide
acaccaatcagaaacatccca

SEQ ID NO: 40610 - DNA, 21 bp, Artificial Sequence
  Description of Artificial Sequence: Synthetic oligonucleotide
acaccaatcagcatgccaagc

SEQ ID NO: 40611 - DNA, 21 bp, Artificial Sequence
  Description of Artificial Sequence: Synthetic oligonucleotide
acaccaatcgtccacatcaac

SEQ ID NO: 40612 - DNA, 21 bp, Artificial Sequence
  Description of Artificial Sequence: Synthetic oligonucleotide
acaccaatcgtccacccaaga

SEQ ID NO: 40613 - DNA, 21 bp, Artificial Sequence
  Description of Artificial Sequence: Synthetic oligonucleotide
acaccaatcgtcaaaccagac

SEQ ID NO: 40614 - DNA, 21 bp, Artificial Sequence
  Description of Artificial Sequence: Synthetic oligonucleotide
acaccaaaagacgcagaagtc

SEQ ID NO: 40615 - DNA, 21 bp, Artificial Sequence
  Description of Artificial Sequence: Synthetic oligonucleotide
acaccaaaactcagcgaacaa

SEQ ID NO: 40616 - DNA, 21 bp, Artificial Sequence
  Description of Artificial Sequence: Synthetic oligonucleotide
acaccaaaaaacacactcgca

SEQ ID NO: 40617 - DNA, 21 bp, Artificial Sequence
  Description of Artificial Sequence: Synthetic oligonucleotide
acaccaaaaagcgcaagcgga

SEQ ID NO: 40618 - DNA, 21 bp, Artificial Sequence
  Description of Artificial Sequence: Synthetic oligonucleotide
acaccactcggaggaagcagc

SEQ ID NO: 40619 - DNA, 21 bp, Artificial Sequence
  Description of Artificial Sequence: Synthetic oligonucleotide
acaccactccacagcccagga

SEQ ID NO: 40620 - DNA, 21 bp, Artificial Sequence
  Description of Artificial Sequence: Synthetic oligonucleotide
acaccactccacagcacaaca

SEQ ID NO: 40621 - DNA, 21 bp, Artificial Sequence
  Description of Artificial Sequence: Synthetic oligonucleotide
acaccactcctctgcggaaaa

SEQ ID NO: 40622 - DNA, 21 bp, Artificial Sequence
  Description of Artificial Sequence: Synthetic oligonucleotide
acaccactcctcagccacagc

SEQ ID NO: 40623 - DNA, 21 bp, Artificial Sequence
  Description of Artificial Sequence: Synthetic oligonucleotide
acaccactccaaacaacagtc

SEQ ID NO: 40624 - DNA, 21 bp, Artificial Sequence
  Description of Artificial Sequence: Synthetic oligonucleotide
acaccactcagaagcagcaac

SEQ ID NO: 40625 - DNA, 21 bp, Artificial Sequence
  Description of Artificial Sequence: Synthetic oligonucleotide
acaccactcagcgcaatccaa

SEQ ID NO: 40626 - DNA, 21 bp, Artificial Sequence
  Description of Artificial Sequence: Synthetic oligonucleotide
acaccactcacaaacatcgca

SEQ ID NO: 40627 - DNA, 21 bp, Artificial Sequence
  Description of Artificial Sequence: Synthetic oligonucleotide
acaccactcacaacagcagga

SEQ ID NO: 40628 - DNA, 21 bp, Artificial Sequence
  Description of Artificial Sequence: Synthetic oligonucleotide
acaccaatggcagtcgaaagc

SEQ ID NO: 40629 - DNA, 21 bp, Artificial Sequence
  Description of Artificial Sequence: Synthetic oligonucleotide
acaccaatggaaatgatccca

SEQ ID NO: 40630 - DNA, 21 bp, Artificial Sequence
  Description of Artificial Sequence: Synthetic oligonucleotide
acaccaatgggaagcggatgg

SEQ ID NO: 40631 - DNA, 21 bp, Artificial Sequence
  Description of Artificial Sequence: Synthetic oligonucleotide
acaccaatgcaagtcccagca

SEQ ID NO: 40632 - DNA, 21 bp, Artificial Sequence
  Description of Artificial Sequence: Synthetic oligonucleotide
acaccaaacatgctcagcgca

SEQ ID NO: 40633 - DNA, 21 bp, Artificial Sequence
  Description of Artificial Sequence: Synthetic oligonucleotide
acaccaaacatggtcacagga

SEQ ID NO: 40634 - DNA, 21 bp, Artificial Sequence
  Description of Artificial Sequence: Synthetic oligonucleotide
acaccaaacagcagaacagtc

SEQ ID NO: 40635 - DNA, 21 bp, Artificial Sequence
  Description of Artificial Sequence: Synthetic oligonucleotide
acaccaaacgtcacatacaga

SEQ ID NO: 40636 - DNA, 21 bp, Artificial Sequence
  Description of Artificial Sequence: Synthetic oligonucleotide
acaccaaactactaccacgaa

SEQ ID NO: 40637 - DNA, 21 bp, Artificial Sequence
  Description of Artificial Sequence: Synthetic oligonucleotide
acaccaccagacggaacaaga

SEQ ID NO: 40638 - DNA, 21 bp, Artificial Sequence
  Description of Artificial Sequence: Synthetic oligonucleotide
acaccaccagaccaaagcaga

SEQ ID NO: 40639 - DNA, 21 bp, Artificial Sequence
  Description of Artificial Sequence: Synthetic oligonucleotide
acaccaccaggagaaatgaga

SEQ ID NO: 40640 - DNA, 21 bp, Artificial Sequence
  Description of Artificial Sequence: Synthetic oligonucleotide
acaccaccactcaaagcaagc

SEQ ID NO: 40641 - DNA, 21 bp, Artificial Sequence
  Description of Artificial Sequence: Synthetic oligonucleotide
acaccaccaccaccaacatgg

SEQ ID NO: 40642 - DNA, 21 bp, Artificial Sequence
  Description of Artificial Sequence: Synthetic oligonucleotide
acaccaccaagaggaatccca

SEQ ID NO: 40643 - DNA, 21 bp, Artificial Sequence
  Description of Artificial Sequence: Synthetic oligonucleotide
acaccaccaagaacagtcgtc

SEQ ID NO: 40644 - DNA, 21 bp, Artificial Sequence
  Description of Artificial Sequence: Synthetic oligonucleotide
acaccaccaagcagcgaatgg

SEQ ID NO: 40645 - DNA, 21 bp, Artificial Sequence
  Description of Artificial Sequence: Synthetic oligonucleotide
acaccaccaacagcaacaaga

SEQ ID NO: 40646 - DNA, 21 bp, Artificial Sequence
  Description of Artificial Sequence: Synthetic oligonucleotide
acaccaccaacactcatggaa

SEQ ID NO: 40647 - DNA, 21 bp, Artificial Sequence
  Description of Artificial Sequence: Synthetic oligonucleotide
acaccaccatacgtcgcacaa

SEQ ID NO: 40648 - DNA, 21 bp, Artificial Sequence
  Description of Artificial Sequence: Synthetic oligonucleotide
acaccacaaggagacatcgca

SEQ ID NO: 40649 - DNA, 21 bp, Artificial Sequence
  Description of Artificial Sequence: Synthetic oligonucleotide
acaccacaacacatgggacca

SEQ ID NO: 40650 - DNA, 21 bp, Artificial Sequence
  Description of Artificial Sequence: Synthetic oligonucleotide
acaccacaacacatgagagga

SEQ ID NO: 40651 - DNA, 21 bp, Artificial Sequence
  Description of Artificial Sequence: Synthetic oligonucleotide
acaccacaaatgccattccca

SEQ ID NO: 40652 - DNA, 21 bp, Artificial Sequence
  Description of Artificial Sequence: Synthetic oligonucleotide
acaccacaaaacatcatggac

SEQ ID NO: 40653 - DNA, 21 bp, Artificial Sequence
  Description of Artificial Sequence: Synthetic oligonucleotide
acaccacaaagagcaggaatc

SEQ ID NO: 40654 - DNA, 21 bp, Artificial Sequence
  Description of Artificial Sequence: Synthetic oligonucleotide
acaccaagagcagaacacaca

SEQ ID NO: 40655 - DNA, 21 bp, Artificial Sequence
  Description of Artificial Sequence: Synthetic oligonucleotide
acaccaagaggacaaagcctc

SEQ ID NO: 40656 - DNA, 21 bp, Artificial Sequence
  Description of Artificial Sequence: Synthetic oligonucleotide
acaccaagaggaagcctcgac

SEQ ID NO: 40657 - DNA, 21 bp, Artificial Sequence
  Description of Artificial Sequence: Synthetic oligonucleotide
acaccaagactcacagtcgaa

SEQ ID NO: 40658 - DNA, 21 bp, Artificial Sequence
  Description of Artificial Sequence: Synthetic oligonucleotide
acaccaagaccaacatacaca

SEQ ID NO: 40659 - DNA, 21 bp, Artificial Sequence
  Description of Artificial Sequence: Synthetic oligonucleotide
acaccaagaacaccaagcagc

SEQ ID NO: 40660 - DNA, 21 bp, Artificial Sequence
  Description of Artificial Sequence: Synthetic oligonucleotide
acaccaagcgcagcaatgatc

SEQ ID NO: 40661 - DNA, 21 bp, Artificial Sequence
  Description of Artificial Sequence: Synthetic oligonucleotide
acaccaagcgcaagcagactc

SEQ ID NO: 40662 - DNA, 21 bp, Artificial Sequence
  Description of Artificial Sequence: Synthetic oligonucleotide
acaccaagccacctcatgagc

SEQ ID NO: 40663 - DNA, 21 bp, Artificial Sequence
  Description of Artificial Sequence: Synthetic oligonucleotide
acaccaagcaaaggactcgtc

SEQ ID NO: 40664 - DNA, 21 bp, Artificial Sequence
  Description of Artificial Sequence: Synthetic oligonucleotide
acaccaagcaacgacatcagc

SEQ ID NO: 40665 - DNA, 21 bp, Artificial Sequence
  Description of Artificial Sequence: Synthetic oligonucleotide
acaccaagcaaccaaagcagc

SEQ ID NO: 40666 - DNA, 21 bp, Artificial Sequence
  Description of Artificial Sequence: Synthetic oligonucleotide
acaccaagcccaggagacgca

SEQ ID NO: 40667 - DNA, 21 bp, Artificial Sequence
  Description of Artificial Sequence: Synthetic oligonucleotide
acaccaagcccaccaggagtc

SEQ ID NO: 40668 - DNA, 21 bp, Artificial Sequence
  Description of Artificial Sequence: Synthetic oligonucleotide
acaccaagcagcgcaggaatc

SEQ ID NO: 40669 - DNA, 21 bp, Artificial Sequence
  Description of Artificial Sequence: Synthetic oligonucleotide
acaccaagcagcggaagcaga

SEQ ID NO: 40670 - DNA, 21 bp, Artificial Sequence
  Description of Artificial Sequence: Synthetic oligonucleotide
acaccaagcagcatgcaccca

SEQ ID NO: 40671 - DNA, 21 bp, Artificial Sequence
  Description of Artificial Sequence: Synthetic oligonucleotide
acaccaagcagcacacaactc

SEQ ID NO: 40672 - DNA, 21 bp, Artificial Sequence
  Description of Artificial Sequence: Synthetic oligonucleotide
acaccaagcgtcgacgcatgc

SEQ ID NO: 40673 - DNA, 21 bp, Artificial Sequence
  Description of Artificial Sequence: Synthetic oligonucleotide
acaccaagcgtcacactcctc

SEQ ID NO: 40674 - DNA, 21 bp, Artificial Sequence
  Description of Artificial Sequence: Synthetic oligonucleotide
acaccaagctacgtcatggca

SEQ ID NO: 40675 - DNA, 21 bp, Artificial Sequence
  Description of Artificial Sequence: Synthetic oligonucleotide
acaccaacagcaagaaaccca

SEQ ID NO: 40676 - DNA, 21 bp, Artificial Sequence
  Description of Artificial Sequence: Synthetic oligonucleotide
acaccaacagaaacaaaatac

SEQ ID NO: 40677 - DNA, 21 bp, Artificial Sequence
  Description of Artificial Sequence: Synthetic oligonucleotide
acaccaacaggaagagacttc

SEQ ID NO: 40678 - DNA, 21 bp, Artificial Sequence
  Description of Artificial Sequence: Synthetic oligonucleotide
acaccaacactcaaaagcaac

SEQ ID NO: 40679 - DNA, 21 bp, Artificial Sequence
  Description of Artificial Sequence: Synthetic oligonucleotide
acaccaacaccagcattcaga

SEQ ID NO: 40680 - DNA, 21 bp, Artificial Sequence
  Description of Artificial Sequence: Synthetic oligonucleotide
acaccaacaagaccaagcgca

SEQ ID NO: 40681 - DNA, 21 bp, Artificial Sequence
  Description of Artificial Sequence: Synthetic oligonucleotide
acaccaacaagcagcgaatgg

SEQ ID NO: 40682 - DNA, 21 bp, Artificial Sequence
  Description of Artificial Sequence: Synthetic oligonucleotide
acaccaacaacaagcaacgaa

SEQ ID NO: 40683 - DNA, 21 bp, Artificial Sequence
  Description of Artificial Sequence: Synthetic oligonucleotide
acaccaacagtcccaagagac

SEQ ID NO: 40684 - DNA, 21 bp, Artificial Sequence
  Description of Artificial Sequence: Synthetic oligonucleotide
acaccagtcctcaactacgga

SEQ ID NO: 40685 - DNA, 21 bp, Artificial Sequence
  Description of Artificial Sequence: Synthetic oligonucleotide
acaccagtcctcagcagcctc

SEQ ID NO: 40686 - DNA, 21 bp, Artificial Sequence
  Description of Artificial Sequence: Synthetic oligonucleotide
acaccagtccaagcagtcgca

SEQ ID NO: 40687 - DNA, 21 bp, Artificial Sequence
  Description of Artificial Sequence: Synthetic oligonucleotide
acaccagtcacaatcaacatg

SEQ ID NO: 40688 - DNA, 21 bp, Artificial Sequence
  Description of Artificial Sequence: Synthetic oligonucleotide
acaccatacccagacacaagc

SEQ ID NO: 40689 - DNA, 21 bp, Artificial Sequence
  Description of Artificial Sequence: Synthetic oligonucleotide
acacaagcagcagcatacaga

SEQ ID NO: 40690 - DNA, 21 bp, Artificial Sequence
  Description of Artificial Sequence: Synthetic oligonucleotide
acacaagcaggattcagcagc

SEQ ID NO: 40691 - DNA, 21 bp, Artificial Sequence
  Description of Artificial Sequence: Synthetic oligonucleotide
acacaagcacacttcgcagga

SEQ ID NO: 40692 - DNA, 21 bp, Artificial Sequence
  Description of Artificial Sequence: Synthetic oligonucleotide
acacaagacagcttcagacac

SEQ ID NO: 40693 - DNA, 21 bp, Artificial Sequence
  Description of Artificial Sequence: Synthetic oligonucleotide
acacaagaactcccaagaagc

SEQ ID NO: 40694 - DNA, 21 bp, Artificial Sequence
  Description of Artificial Sequence: Synthetic oligonucleotide
acacaagaaaacgtcgaaaga

SEQ ID NO: 40695 - DNA, 21 bp, Artificial Sequence
  Description of Artificial Sequence: Synthetic oligonucleotide
acacaagaagtcgaaagagaa

SEQ ID NO: 40696 - DNA, 21 bp, Artificial Sequence
  Description of Artificial Sequence: Synthetic oligonucleotide
acacaattcccagcactcgga

SEQ ID NO: 40697 - DNA, 21 bp, Artificial Sequence
  Description of Artificial Sequence: Synthetic oligonucleotide
acacaattcacacacaaagca

SEQ ID NO: 40698 - DNA, 21 bp, Artificial Sequence
  Description of Artificial Sequence: Synthetic oligonucleotide
acacaaggagacgtcagcagc

SEQ ID NO: 40699 - DNA, 21 bp, Artificial Sequence
  Description of Artificial Sequence: Synthetic oligonucleotide
acacaaggactcgacgtcgaa

SEQ ID NO: 40700 - DNA, 21 bp, Artificial Sequence
  Description of Artificial Sequence: Synthetic oligonucleotide
acacaaggacaagcaaaccca

SEQ ID NO: 40701 - DNA, 21 bp, Artificial Sequence
  Description of Artificial Sequence: Synthetic oligonucleotide
acacaaggaagagactacgtc

SEQ ID NO: 40702 - DNA, 21 bp, Artificial Sequence
  Description of Artificial Sequence: Synthetic oligonucleotide
acacaaggaacaagagcatgg

SEQ ID NO: 40703 - DNA, 21 bp, Artificial Sequence
  Description of Artificial Sequence: Synthetic oligonucleotide
acacaacacgcaggaggattc

SEQ ID NO: 40704 - DNA, 21 bp, Artificial Sequence
  Description of Artificial Sequence: Synthetic oligonucleotide
acacaaatcagcagcatgagc

SEQ ID NO: 40705 - DNA, 21 bp, Artificial Sequence
  Description of Artificial Sequence: Synthetic oligonucleotide
acacaaatcacagtcgacgaa

SEQ ID NO: 40706 - DNA, 21 bp, Artificial Sequence
  Description of Artificial Sequence: Synthetic oligonucleotide
acacaaaaactcagcatgagc

SEQ ID NO: 40707 - DNA, 21 bp, Artificial Sequence
  Description of Artificial Sequence: Synthetic oligonucleotide
acacaaaaagtcagcgaccca

SEQ ID NO: 40708 - DNA, 21 bp, Artificial Sequence
  Description of Artificial Sequence: Synthetic oligonucleotide
acacaactcaacgtcagcaga

SEQ ID NO: 40709 - DNA, 21 bp, Artificial Sequence
  Description of Artificial Sequence: Synthetic oligonucleotide
acacaactcagcgtcaaccca

SEQ ID NO: 40710 - DNA, 21 bp, Artificial Sequence
  Description of Artificial Sequence: Synthetic oligonucleotide
acacaaatgacaaaagcaagc

SEQ ID NO: 40711 - DNA, 21 bp, Artificial Sequence
  Description of Artificial Sequence: Synthetic oligonucleotide
acacaaaacgaaccacacctc

SEQ ID NO: 40712 - DNA, 21 bp, Artificial Sequence
  Description of Artificial Sequence: Synthetic oligonucleotide
acacaaaacctctgcgacaga

SEQ ID NO: 40713 - DNA, 21 bp, Artificial Sequence
  Description of Artificial Sequence: Synthetic oligonucleotide
acacaaccaccactcagccaa

SEQ ID NO: 40714 - DNA, 21 bp, Artificial Sequence
  Description of Artificial Sequence: Synthetic oligonucleotide
acacaaccaagcgcagcagca

SEQ ID NO: 40715 - DNA, 21 bp, Artificial Sequence
  Description of Artificial Sequence: Synthetic oligonucleotide
acacaaccaagcctccaagca

SEQ ID NO: 40716 - DNA, 21 bp, Artificial Sequence
  Description of Artificial Sequence: Synthetic oligonucleotide
acacaaccaagcagaccactc

SEQ ID NO: 40717 - DNA, 21 bp, Artificial Sequence
  Description of Artificial Sequence: Synthetic oligonucleotide
acacaaccaacaggatgcgaa

SEQ ID NO: 40718 - DNA, 21 bp, Artificial Sequence
  Description of Artificial Sequence: Synthetic oligonucleotide
acacaaccatacggacacgca

SEQ ID NO: 40719 - DNA, 21 bp, Artificial Sequence
  Description of Artificial Sequence: Synthetic oligonucleotide
acacaacaaagcacaatcagc

SEQ ID NO: 40720 - DNA, 21 bp, Artificial Sequence
  Description of Artificial Sequence: Synthetic oligonucleotide
acacaacaaacaccaagagga

SEQ ID NO: 40721 - DNA, 21 bp, Artificial Sequence
  Description of Artificial Sequence: Synthetic oligonucleotide
acacaacaaacaagcgcatac

SEQ ID NO: 40722 - DNA, 21 bp, Artificial Sequence
  Description of Artificial Sequence: Synthetic oligonucleotide
acacaaagagaaacaaacagc

SEQ ID NO: 40723 - DNA, 21 bp, Artificial Sequence
  Description of Artificial Sequence: Synthetic oligonucleotide
acacaaagaggaagcgcagaa

SEQ ID NO: 40724 - DNA, 21 bp, Artificial Sequence
  Description of Artificial Sequence: Synthetic oligonucleotide
acacaaagaccaatcacagtc

SEQ ID NO: 40725 - DNA, 21 bp, Artificial Sequence
  Description of Artificial Sequence: Synthetic oligonucleotide
acacaaagagtcgcaagagac

SEQ ID NO: 40726 - DNA, 21 bp, Artificial Sequence
  Description of Artificial Sequence: Synthetic oligonucleotide
acacaaagcgcaatgagcgtc

SEQ ID NO: 40727 - DNA, 21 bp, Artificial Sequence
  Description of Artificial Sequence: Synthetic oligonucleotide
acacaaagcgaaacagtcctc

SEQ ID NO: 40728 - DNA, 21 bp, Artificial Sequence
  Description of Artificial Sequence: Synthetic oligonucleotide
acacaaagcttcggaagcgca

SEQ ID NO: 40729 - DNA, 21 bp, Artificial Sequence
  Description of Artificial Sequence: Synthetic oligonucleotide
acacaaagcctcgcaagcgaa

SEQ ID NO: 40730 - DNA, 21 bp, Artificial Sequence
  Description of Artificial Sequence: Synthetic oligonucleotide
acacaaagcctcatggacgac

SEQ ID NO: 40731 - DNA, 21 bp, Artificial Sequence
  Description of Artificial Sequence: Synthetic oligonucleotide
acacaaagcagagacatgagc

SEQ ID NO: 40732 - DNA, 21 bp, Artificial Sequence
  Description of Artificial Sequence: Synthetic oligonucleotide
acacaaagcagcgcactcagc

SEQ ID NO: 40733 - DNA, 21 bp, Artificial Sequence
  Description of Artificial Sequence: Synthetic oligonucleotide
acacaaagcagccaaagaatc

SEQ ID NO: 40734 - DNA, 21 bp, Artificial Sequence
  Description of Artificial Sequence: Synthetic oligonucleotide
acacaaagcagcacaggacca

SEQ ID NO: 40735 - DNA, 21 bp, Artificial Sequence
  Description of Artificial Sequence: Synthetic oligonucleotide
acacaaagcagcacacaacca

SEQ ID NO: 40736 - DNA, 21 bp, Artificial Sequence
  Description of Artificial Sequence: Synthetic oligonucleotide
acacaaacaagaccagtcgga

SEQ ID NO: 40737 - DNA, 21 bp, Artificial Sequence
  Description of Artificial Sequence: Synthetic oligonucleotide
acacaaacaacaatcatgcca

SEQ ID NO: 40738 - DNA, 21 bp, Artificial Sequence
  Description of Artificial Sequence: Synthetic oligonucleotide
acacaaacaacaagcctctac

SEQ ID NO: 40739 - DNA, 21 bp, Artificial Sequence
  Description of Artificial Sequence: Synthetic oligonucleotide
acacaaacaacaagcccagtc

SEQ ID NO: 40740 - DNA, 21 bp, Artificial Sequence
  Description of Artificial Sequence: Synthetic oligonucleotide
acacaagtcgcactcagacca

SEQ ID NO: 40741 - DNA, 21 bp, Artificial Sequence
  Description of Artificial Sequence: Synthetic oligonucleotide
acacaagtcgcaacataccaa

SEQ ID NO: 40742 - DNA, 21 bp, Artificial Sequence
  Description of Artificial Sequence: Synthetic oligonucleotide
acacaatggctcgcacaagga

SEQ ID NO: 40743 - DNA, 21 bp, Artificial Sequence
  Description of Artificial Sequence: Synthetic oligonucleotide
acaagagcagcactcggaaca

SEQ ID NO: 40744 - DNA, 21 bp, Artificial Sequence
  Description of Artificial Sequence: Synthetic oligonucleotide
acaagagcactccaagcagga

SEQ ID NO: 40745 - DNA, 21 bp, Artificial Sequence
  Description of Artificial Sequence: Synthetic oligonucleotide
acaagagcaaacgcaacaaac

SEQ ID NO: 40746 - DNA, 21 bp, Artificial Sequence
  Description of Artificial Sequence: Synthetic oligonucleotide
acaagagcaccagcaacaatg

SEQ ID NO: 40747 - DNA, 21 bp, Artificial Sequence
  Description of Artificial Sequence: Synthetic oligonucleotide
acaagagcaagcacagcaaac

SEQ ID NO: 40748 - DNA, 21 bp, Artificial Sequence
  Description of Artificial Sequence: Synthetic oligonucleotide
acaagagcaacaggagacgca

SEQ ID NO: 40749 - DNA, 21 bp, Artificial Sequence
  Description of Artificial Sequence: Synthetic oligonucleotide
acaagagcagtcgacggaaga

SEQ ID NO: 40750 - DNA, 21 bp, Artificial Sequence
  Description of Artificial Sequence: Synthetic oligonucleotide
acaagagcagtcggaggacaa

SEQ ID NO: 40751 - DNA, 21 bp, Artificial Sequence
  Description of Artificial Sequence: Synthetic oligonucleotide
acaagagacgaatgggcaaca

SEQ ID NO: 40752 - DNA, 21 bp, Artificial Sequence
  Description of Artificial Sequence: Synthetic oligonucleotide
acaagagacagaggaccaagc

SEQ ID NO: 40753 - DNA, 21 bp, Artificial Sequence
  Description of Artificial Sequence: Synthetic oligonucleotide
acaagagacacaagctacaca

SEQ ID NO: 40754 - DNA, 21 bp, Artificial Sequence
  Description of Artificial Sequence: Synthetic oligonucleotide
acaagagaaggattcatggtc

SEQ ID NO: 40755 - DNA, 21 bp, Artificial Sequence
  Description of Artificial Sequence: Synthetic oligonucleotide
acaagagaaatgggaccaagc

SEQ ID NO: 40756 - DNA, 21 bp, Artificial Sequence
  Description of Artificial Sequence: Synthetic oligonucleotide
acaagagaaacagtcccagca

SEQ ID NO: 40757 - DNA, 21 bp, Artificial Sequence
  Description of Artificial Sequence: Synthetic oligonucleotide
acaagattctgcagcagccca

SEQ ID NO: 40758 - DNA, 21 bp, Artificial Sequence
  Description of Artificial Sequence: Synthetic oligonucleotide
acaagattcgaaaaatacgac

SEQ ID NO: 40759 - DNA, 21 bp, Artificial Sequence
  Description of Artificial Sequence: Synthetic oligonucleotide
acaagattccaagtcgaagtc

SEQ ID NO: 40760 - DNA, 21 bp, Artificial Sequence
  Description of Artificial Sequence: Synthetic oligonucleotide
acaagaggaggagacggagtc

SEQ ID NO: 40761 - DNA, 21 bp, Artificial Sequence
  Description of Artificial Sequence: Synthetic oligonucleotide
acaagaggaacagacctcagc

SEQ ID NO: 40762 - DNA, 21 bp, Artificial Sequence
  Description of Artificial Sequence: Synthetic oligonucleotide
acaagaggaacaagcgtcagc

SEQ ID NO: 40763 - DNA, 21 bp, Artificial Sequence
  Description of Artificial Sequence: Synthetic oligonucleotide
acaagaggagtcatcaacgca

SEQ ID NO: 40764 - DNA, 21 bp, Artificial Sequence
  Description of Artificial Sequence: Synthetic oligonucleotide
acaagacacgacttcctcaac

SEQ ID NO: 40765 - DNA, 21 bp, Artificial Sequence
  Description of Artificial Sequence: Synthetic oligonucleotide
acaagaatcggaccaagcgaa

SEQ ID NO: 40766 - DNA, 21 bp, Artificial Sequence
  Description of Artificial Sequence: Synthetic oligonucleotide
acaagaatccacgcactccca

SEQ ID NO: 40767 - DNA, 21 bp, Artificial Sequence
  Description of Artificial Sequence: Synthetic oligonucleotide
acaagaatcagcctcagcgga

SEQ ID NO: 40768 - DNA, 21 bp, Artificial Sequence
  Description of Artificial Sequence: Synthetic oligonucleotide
acaagaaaactcgcagtcgac

SEQ ID NO: 40769 - DNA, 21 bp, Artificial Sequence
  Description of Artificial Sequence: Synthetic oligonucleotide
acaagactcaacagcatcgac

SEQ ID NO: 40770 - DNA, 21 bp, Artificial Sequence
  Description of Artificial Sequence: Synthetic oligonucleotide
acaagactcccaacaagcctc

SEQ ID NO: 40771 - DNA, 21 bp, Artificial Sequence
  Description of Artificial Sequence: Synthetic oligonucleotide
acaagactccaaacaagcgca

SEQ ID NO: 40772 - DNA, 21 bp, Artificial Sequence
  Description of Artificial Sequence: Synthetic oligonucleotide
acaagactcagcgaaaacaca

SEQ ID NO: 40773 - DNA, 21 bp, Artificial Sequence
  Description of Artificial Sequence: Synthetic oligonucleotide
acaagactcagcagcagcgtc

SEQ ID NO: 40774 - DNA, 21 bp, Artificial Sequence
  Description of Artificial Sequence: Synthetic oligonucleotide
acaagaatggcaagcgacgga

SEQ ID NO: 40775 - DNA, 21 bp, Artificial Sequence
  Description of Artificial Sequence: Synthetic oligonucleotide
acaagaatgccaagcggagtc

SEQ ID NO: 40776 - DNA, 21 bp, Artificial Sequence
  Description of Artificial Sequence: Synthetic oligonucleotide
acaagaatgccagtcatcagc

SEQ ID NO: 40777 - DNA, 21 bp, Artificial Sequence
  Description of Artificial Sequence: Synthetic oligonucleotide
acaagaaacgaatacagcttc

SEQ ID NO: 40778 - DNA, 21 bp, Artificial Sequence
  Description of Artificial Sequence: Synthetic oligonucleotide
acaagaaacctcgacagcgtc

SEQ ID NO: 40779 - DNA, 21 bp, Artificial Sequence
  Description of Artificial Sequence: Synthetic oligonucleotide
acaagaaacatgagcgacaca

SEQ ID NO: 40780 - DNA, 21 bp, Artificial Sequence
  Description of Artificial Sequence: Synthetic oligonucleotide
acaagaaacaaccacgtcaca

SEQ ID NO: 40781 - DNA, 21 bp, Artificial Sequence
  Description of Artificial Sequence: Synthetic oligonucleotide
acaagaaacccagaaccaaaa

SEQ ID NO: 40782 - DNA, 21 bp, Artificial Sequence
  Description of Artificial Sequence: Synthetic oligonucleotide
acaagaaacccagaaagcaca

SEQ ID NO: 40783 - DNA, 21 bp, Artificial Sequence
  Description of Artificial Sequence: Synthetic oligonucleotide
acaagaaacccaggaacaaca

SEQ ID NO: 40784 - DNA, 21 bp, Artificial Sequence
  Description of Artificial Sequence: Synthetic oligonucleotide
acaagaaaccaactcagagac

SEQ ID NO: 40785 - DNA, 21 bp, Artificial Sequence
  Description of Artificial Sequence: Synthetic oligonucleotide
acaagaaacagcggaatggca

SEQ ID NO: 40786 - DNA, 21 bp, Artificial Sequence
  Description of Artificial Sequence: Synthetic oligonucleotide
acaagaaacacaacagaagca

SEQ ID NO: 40787 - DNA, 21 bp, Artificial Sequence
  Description of Artificial Sequence: Synthetic oligonucleotide
acaagaccagcaccaatggca

SEQ ID NO: 40788 - DNA, 21 bp, Artificial Sequence
  Description of Artificial Sequence: Synthetic oligonucleotide
acaagaccagacagcctccca

SEQ ID NO: 40789 - DNA, 21 bp, Artificial Sequence
  Description of Artificial Sequence: Synthetic oligonucleotide
acaagaccaggagtcgacaca

SEQ ID NO: 40790 - DNA, 21 bp, Artificial Sequence
  Description of Artificial Sequence: Synthetic oligonucleotide
acaagaccactcgcaatcgca

SEQ ID NO: 40791 - DNA, 21 bp, Artificial Sequence
  Description of Artificial Sequence: Synthetic oligonucleotide
acaagaccactcccaagcaac

SEQ ID NO: 40792 - DNA, 21 bp, Artificial Sequence
  Description of Artificial Sequence: Synthetic oligonucleotide
acaagaccactcagcagcgga

SEQ ID NO: 40793 - DNA, 21 bp, Artificial Sequence
  Description of Artificial Sequence: Synthetic oligonucleotide
acaagaccactcagcagccca

SEQ ID NO: 40794 - DNA, 21 bp, Artificial Sequence
  Description of Artificial Sequence: Synthetic oligonucleotide
acaagaccaatggaaagcgca

SEQ ID NO: 40795 - DNA, 21 bp, Artificial Sequence
  Description of Artificial Sequence: Synthetic oligonucleotide
acaagaccaaacctcccatac

SEQ ID NO: 40796 - DNA, 21 bp, Artificial Sequence
  Description of Artificial Sequence: Synthetic oligonucleotide
acaagaccaagcgaagcacaa

SEQ ID NO: 40797 - DNA, 21 bp, Artificial Sequence
  Description of Artificial Sequence: Synthetic oligonucleotide
acaagaccaagctacgaaatg

SEQ ID NO: 40798 - DNA, 21 bp, Artificial Sequence
  Description of Artificial Sequence: Synthetic oligonucleotide
acaagaccaacagcagacgac

SEQ ID NO: 40799 - DNA, 21 bp, Artificial Sequence
  Description of Artificial Sequence: Synthetic oligonucleotide
acaagaccaacaccactcctc

SEQ ID NO: 40800 - DNA, 21 bp, Artificial Sequence
  Description of Artificial Sequence: Synthetic oligonucleotide
acaagaccagtcggaacaagc

SEQ ID NO: 40801 - DNA, 21 bp, Artificial Sequence
  Description of Artificial Sequence: Synthetic oligonucleotide
acaagaccagtctacgcagac

SEQ ID NO: 40802 - DNA, 21 bp, Artificial Sequence
  Description of Artificial Sequence: Synthetic oligonucleotide
acaagacaagcaacaagcgaa

SEQ ID NO: 40803 - DNA, 21 bp, Artificial Sequence
  Description of Artificial Sequence: Synthetic oligonucleotide
acaagacaactcctcacagca

SEQ ID NO: 40804 - DNA, 21 bp, Artificial Sequence
  Description of Artificial Sequence: Synthetic oligonucleotide
acaagacaatacacaaacagc

SEQ ID NO: 40805 - DNA, 21 bp, Artificial Sequence
  Description of Artificial Sequence: Synthetic oligonucleotide
acaagaagaccagacatcgca

SEQ ID NO: 40806 - DNA, 21 bp, Artificial Sequence
  Description of Artificial Sequence: Synthetic oligonucleotide
acaagaagagtcccaagcgaa

SEQ ID NO: 40807 - DNA, 21 bp, Artificial Sequence
  Description of Artificial Sequence: Synthetic oligonucleotide
acaagaagcgcactcgaactc

SEQ ID NO: 40808 - DNA, 21 bp, Artificial Sequence
  Description of Artificial Sequence: Synthetic oligonucleotide
acaagaagcgcagtcggaagc

SEQ ID NO: 40809 - DNA, 21 bp, Artificial Sequence
  Description of Artificial Sequence: Synthetic oligonucleotide
acaagaagcttcgaaagcagc

SEQ ID NO: 40810 - DNA, 21 bp, Artificial Sequence
  Description of Artificial Sequence: Synthetic oligonucleotide
acaagaagcggactcatcgaa

SEQ ID NO: 40811 - DNA, 21 bp, Artificial Sequence
  Description of Artificial Sequence: Synthetic oligonucleotide
acaagaagcggaacagacctc

SEQ ID NO: 40812 - DNA, 21 bp, Artificial Sequence
  Description of Artificial Sequence: Synthetic oligonucleotide
acaagaagcatggtcacactc

SEQ ID NO: 40813 - DNA, 21 bp, Artificial Sequence
  Description of Artificial Sequence: Synthetic oligonucleotide
acaagaagcaacgaaacagtc

SEQ ID NO: 40814 - DNA, 21 bp, Artificial Sequence
  Description of Artificial Sequence: Synthetic oligonucleotide
acaagaagcaacggactcaca

SEQ ID NO: 40815 - DNA, 21 bp, Artificial Sequence
  Description of Artificial Sequence: Synthetic oligonucleotide
acaagaagcaacaacagcaca

SEQ ID NO: 40816 - DNA, 21 bp, Artificial Sequence
  Description of Artificial Sequence: Synthetic oligonucleotide
acaagaagcccaagcagctac

SEQ ID NO: 40817 - DNA, 21 bp, Artificial Sequence
  Description of Artificial Sequence: Synthetic oligonucleotide
acaagaagccaacacgaaagc

SEQ ID NO: 40818 - DNA, 21 bp, Artificial Sequence
  Description of Artificial Sequence: Synthetic oligonucleotide
acaagaagccaaagcccaatg

SEQ ID NO: 40819 - DNA, 21 bp, Artificial Sequence
  Description of Artificial Sequence: Synthetic oligonucleotide
acaagaagcagcctcacacca

SEQ ID NO: 40820 - DNA, 21 bp, Artificial Sequence
  Description of Artificial Sequence: Synthetic oligonucleotide
acaagaagcagcagcatcctc

SEQ ID NO: 40821 - DNA, 21 bp, Artificial Sequence
  Description of Artificial Sequence: Synthetic oligonucleotide
acaagaagcacagcaagccca

SEQ ID NO: 40822 - DNA, 21 bp, Artificial Sequence
  Description of Artificial Sequence: Synthetic oligonucleotide
acaagaagcacaccaatctac

SEQ ID NO: 40823 - DNA, 21 bp, Artificial Sequence
  Description of Artificial Sequence: Synthetic oligonucleotide
acaagaagcgtcgaactcctc

SEQ ID NO: 40824 - DNA, 21 bp, Artificial Sequence
  Description of Artificial Sequence: Synthetic oligonucleotide
acaagaacaatcacaccactc

SEQ ID NO: 40825 - DNA, 21 bp, Artificial Sequence
  Description of Artificial Sequence: Synthetic oligonucleotide
acaagaacactcacaagcagc

SEQ ID NO: 40826 - DNA, 21 bp, Artificial Sequence
  Description of Artificial Sequence: Synthetic oligonucleotide
acaagaacaatgagcatgagc

SEQ ID NO: 40827 - DNA, 21 bp, Artificial Sequence
  Description of Artificial Sequence: Synthetic oligonucleotide
acaagaacaaacagcatcatc

SEQ ID NO: 40828 - DNA, 21 bp, Artificial Sequence
  Description of Artificial Sequence: Synthetic oligonucleotide
acaagaacaagactcggagac

SEQ ID NO: 40829 - DNA, 21 bp, Artificial Sequence
  Description of Artificial Sequence: Synthetic oligonucleotide
acaagaacaagcgacttccca

SEQ ID NO: 40830 - DNA, 21 bp, Artificial Sequence
  Description of Artificial Sequence: Synthetic oligonucleotide
acaagaacaagccacgcactc

SEQ ID NO: 40831 - DNA, 21 bp, Artificial Sequence
  Description of Artificial Sequence: Synthetic oligonucleotide
acaagaacaagccaaccaagc

SEQ ID NO: 40832 - DNA, 21 bp, Artificial Sequence
  Description of Artificial Sequence: Synthetic oligonucleotide
acaagaacaagcacaggaagc

SEQ ID NO: 40833 - DNA, 21 bp, Artificial Sequence
  Description of Artificial Sequence: Synthetic oligonucleotide
acaagaacaacaggaagcatg

SEQ ID NO: 40834 - DNA, 21 bp, Artificial Sequence
  Description of Artificial Sequence: Synthetic oligonucleotide
acaagaacaacactcgaaagc

SEQ ID NO: 40835 - DNA, 21 bp, Artificial Sequence
  Description of Artificial Sequence: Synthetic oligonucleotide
acaagaacaacaacagtcaca

SEQ ID NO: 40836 - DNA, 21 bp, Artificial Sequence
  Description of Artificial Sequence: Synthetic oligonucleotide
acaagaacagtcgcaacatac

SEQ ID NO: 40837 - DNA, 21 bp, Artificial Sequence
  Description of Artificial Sequence: Synthetic oligonucleotide
acaagaacagtccaactcgga

SEQ ID NO: 40838 - DNA, 21 bp, Artificial Sequence
  Description of Artificial Sequence: Synthetic oligonucleotide
acaagagtccacggagtcagc

SEQ ID NO: 40839 - DNA, 21 bp, Artificial Sequence
  Description of Artificial Sequence: Synthetic oligonucleotide
acaagagtcatcatgaacgac

SEQ ID NO: 40840 - DNA, 21 bp, Artificial Sequence
  Description of Artificial Sequence: Synthetic oligonucleotide
acaagagtcagcagcatccca

SEQ ID NO: 40841 - DNA, 21 bp, Artificial Sequence
  Description of Artificial Sequence: Synthetic oligonucleotide
acaagagtcacagcaccactc

SEQ ID NO: 40842 - DNA, 21 bp, Artificial Sequence
  Description of Artificial Sequence: Synthetic oligonucleotide
acaagagtctacccagcagga

SEQ ID NO: 40843 - DNA, 21 bp, Artificial Sequence
  Description of Artificial Sequence: Synthetic oligonucleotide
acaagcgcaggactcaactac

SEQ ID NO: 40844 - DNA, 21 bp, Artificial Sequence
  Description of Artificial Sequence: Synthetic oligonucleotide
acaagcgcaggagtctacaaa

SEQ ID NO: 40845 - DNA, 21 bp, Artificial Sequence
  Description of Artificial Sequence: Synthetic oligonucleotide
acaagcgcaaaacacacaatg

SEQ ID NO: 40846 - DNA, 21 bp, Artificial Sequence
  Description of Artificial Sequence: Synthetic oligonucleotide
acaagcgcactcatcttcgaa

SEQ ID NO: 40847 - DNA, 21 bp, Artificial Sequence
  Description of Artificial Sequence: Synthetic oligonucleotide
acaagcgcacaaagcggacca

SEQ ID NO: 40848 - DNA, 21 bp, Artificial Sequence
  Description of Artificial Sequence: Synthetic oligonucleotide
acaagcgcaagaccattcctc

SEQ ID NO: 40849 - DNA, 21 bp, Artificial Sequence
  Description of Artificial Sequence: Synthetic oligonucleotide
acaagcgcaagaccagtcgga

SEQ ID NO: 40850 - DNA, 21 bp, Artificial Sequence
  Description of Artificial Sequence: Synthetic oligonucleotide
acaagcgcaagcatcccacca

SEQ ID NO: 40851 - DNA, 21 bp, Artificial Sequence
  Description of Artificial Sequence: Synthetic oligonucleotide
acaagcgcaagcagcacaaca

SEQ ID NO: 40852 - DNA, 21 bp, Artificial Sequence
  Description of Artificial Sequence: Synthetic oligonucleotide
acaagcgacctcccactcaac

SEQ ID NO: 40853 - DNA, 21 bp, Artificial Sequence
  Description of Artificial Sequence: Synthetic oligonucleotide
acaagcgacctcagaggaaga

SEQ ID NO: 40854 - DNA, 21 bp, Artificial Sequence
  Description of Artificial Sequence: Synthetic oligonucleotide
acaagcgacaacatgccacac

SEQ ID NO: 40855 - DNA, 21 bp, Artificial Sequence
  Description of Artificial Sequence: Synthetic oligonucleotide
acaagcgacccatgcatgagc

SEQ ID NO: 40856 - DNA, 21 bp, Artificial Sequence
  Description of Artificial Sequence: Synthetic oligonucleotide
acaagcgacagcgcagtcaca

SEQ ID NO: 40857 - DNA, 21 bp, Artificial Sequence
  Description of Artificial Sequence: Synthetic oligonucleotide
acaagcgacgtcctcctcaca

SEQ ID NO: 40858 - DNA, 21 bp, Artificial Sequence
  Description of Artificial Sequence: Synthetic oligonucleotide
acaagcgaaagcaaagcacac

SEQ ID NO: 40859 - DNA, 21 bp, Artificial Sequence
  Description of Artificial Sequence: Synthetic oligonucleotide
acaagcgaaagctggccaagc

SEQ ID NO: 40860 - DNA, 21 bp, Artificial Sequence
  Description of Artificial Sequence: Synthetic oligonucleotide
acaagcttcggaccaagcagc

SEQ ID NO: 40861 - DNA, 21 bp, Artificial Sequence
  Description of Artificial Sequence: Synthetic oligonucleotide
acaagcttcctcaaaacaagc

SEQ ID NO: 40862 - DNA, 21 bp, Artificial Sequence
  Description of Artificial Sequence: Synthetic oligonucleotide
acaagcttcccaagcagcgca

SEQ ID NO: 40863 - DNA, 21 bp, Artificial Sequence
  Description of Artificial Sequence: Synthetic oligonucleotide
acaagcttcagactcgacgaa

SEQ ID NO: 40864 - DNA, 21 bp, Artificial Sequence
  Description of Artificial Sequence: Synthetic oligonucleotide
acaagcttcagccaaagcaca

SEQ ID NO: 40865 - DNA, 21 bp, Artificial Sequence
  Description of Artificial Sequence: Synthetic oligonucleotide
acaagcttcagcagaggactc

SEQ ID NO: 40866 - DNA, 21 bp, Artificial Sequence
  Description of Artificial Sequence: Synthetic oligonucleotide
acaagcggacaccacatcctc

SEQ ID NO: 40867 - DNA, 21 bp, Artificial Sequence
  Description of Artificial Sequence: Synthetic oligonucleotide
acaagcggactcccagaagca

SEQ ID NO: 40868 - DNA, 21 bp, Artificial Sequence
  Description of Artificial Sequence: Synthetic oligonucleotide
acaagcggactcagcgaagtc

SEQ ID NO: 40869 - DNA, 21 bp, Artificial Sequence
  Description of Artificial Sequence: Synthetic oligonucleotide
acaagcggactcacactcgga

SEQ ID NO: 40870 - DNA, 21 bp, Artificial Sequence
  Description of Artificial Sequence: Synthetic oligonucleotide
acaagcggaccaagccacgga

SEQ ID NO: 40871 - DNA, 21 bp, Artificial Sequence
  Description of Artificial Sequence: Synthetic oligonucleotide
acaagcggaagaagcccaaca

SEQ ID NO: 40872 - DNA, 21 bp, Artificial Sequence
  Description of Artificial Sequence: Synthetic oligonucleotide
acaagcggaagcctcagacca

SEQ ID NO: 40873 - DNA, 21 bp, Artificial Sequence
  Description of Artificial Sequence: Synthetic oligonucleotide
acaagcggaagcacaagcgga

SEQ ID NO: 40874 - DNA, 21 bp, Artificial Sequence
  Description of Artificial Sequence: Synthetic oligonucleotide
acaagcggaacactcagcaca

SEQ ID NO: 40875 - DNA, 21 bp, Artificial Sequence
  Description of Artificial Sequence: Synthetic oligonucleotide
acaagcggaacaagcacagac

SEQ ID NO: 40876 - DNA, 21 bp, Artificial Sequence
  Description of Artificial Sequence: Synthetic oligonucleotide
acaagccacggaccagcaaca

SEQ ID NO: 40877 - DNA, 21 bp, Artificial Sequence
  Description of Artificial Sequence: Synthetic oligonucleotide
acaagccacaacggattcagc

SEQ ID NO: 40878 - DNA, 21 bp, Artificial Sequence
  Description of Artificial Sequence: Synthetic oligonucleotide
acaagccacagaccacaacca

SEQ ID NO: 40879 - DNA, 21 bp, Artificial Sequence
  Description of Artificial Sequence: Synthetic oligonucleotide
acaagcatcggaccaagaatc

SEQ ID NO: 40880 - DNA, 21 bp, Artificial Sequence
  Description of Artificial Sequence: Synthetic oligonucleotide
acaagcatcaacagactccca

SEQ ID NO: 40881 - DNA, 21 bp, Artificial Sequence
  Description of Artificial Sequence: Synthetic oligonucleotide
acaagcaaagacggacaccca

SEQ ID NO: 40882 - DNA, 21 bp, Artificial Sequence
  Description of Artificial Sequence: Synthetic oligonucleotide
acaagcaaactcagctgccca

SEQ ID NO: 40883 - DNA, 21 bp, Artificial Sequence
  Description of Artificial Sequence: Synthetic oligonucleotide
acaagcaaaacaccaagcatc

SEQ ID NO: 40884 - DNA, 21 bp, Artificial Sequence
  Description of Artificial Sequence: Synthetic oligonucleotide
acaagcaaagtcgcaacaatc

SEQ ID NO: 40885 - DNA, 21 bp, Artificial Sequence
  Description of Artificial Sequence: Synthetic oligonucleotide
acaagcaaatggctcacacca

SEQ ID NO: 40886 - DNA, 21 bp, Artificial Sequence
  Description of Artificial Sequence: Synthetic oligonucleotide
acaagcctcgacgcaagaagc

SEQ ID NO: 40887 - DNA, 21 bp, Artificial Sequence
  Description of Artificial Sequence: Synthetic oligonucleotide
acaagcctcggaagcgtcagc

SEQ ID NO: 40888 - DNA, 21 bp, Artificial Sequence
  Description of Artificial Sequence: Synthetic oligonucleotide
acaagcctccacagcggagac

SEQ ID NO: 40889 - DNA, 21 bp, Artificial Sequence
  Description of Artificial Sequence: Synthetic oligonucleotide
acaagcctcaacaacagactc

SEQ ID NO: 40890 - DNA, 21 bp, Artificial Sequence
  Description of Artificial Sequence: Synthetic oligonucleotide
acaagcctcagaatcatgcca

SEQ ID NO: 40891 - DNA, 21 bp, Artificial Sequence
  Description of Artificial Sequence: Synthetic oligonucleotide
acaagcctcagaatgaacgga

SEQ ID NO: 40892 - DNA, 21 bp, Artificial Sequence
  Description of Artificial Sequence: Synthetic oligonucleotide
acaagcctcagaagcgaccca

SEQ ID NO: 40893 - DNA, 21 bp, Artificial Sequence
  Description of Artificial Sequence: Synthetic oligonucleotide
acaagcctcagcctcgcactc

SEQ ID NO: 40894 - DNA, 21 bp, Artificial Sequence
  Description of Artificial Sequence: Synthetic oligonucleotide
acaagcctcacaccagtcagc

SEQ ID NO: 40895 - DNA, 21 bp, Artificial Sequence
  Description of Artificial Sequence: Synthetic oligonucleotide
acaagcctcgtcttcgcagtc

SEQ ID NO: 40896 - DNA, 21 bp, Artificial Sequence
  Description of Artificial Sequence: Synthetic oligonucleotide
acaagcatgaacctcccagac

SEQ ID NO: 40897 - DNA, 21 bp, Artificial Sequence
  Description of Artificial Sequence: Synthetic oligonucleotide
acaagcatgagaacagaactc

SEQ ID NO: 40898 - DNA, 21 bp, Artificial Sequence
  Description of Artificial Sequence: Synthetic oligonucleotide
acaagcatgagcccaagacac

SEQ ID NO: 40899 - DNA, 21 bp, Artificial Sequence
  Description of Artificial Sequence: Synthetic oligonucleotide
acaagcatgagcccaacaaca

SEQ ID NO: 40900 - DNA, 21 bp, Artificial Sequence
  Description of Artificial Sequence: Synthetic oligonucleotide
acaagcaacgcagtcgactac

SEQ ID NO: 40901 - DNA, 21 bp, Artificial Sequence
  Description of Artificial Sequence: Synthetic oligonucleotide
acaagcaacggactcaaactc

SEQ ID NO: 40902 - DNA, 21 bp, Artificial Sequence
  Description of Artificial Sequence: Synthetic oligonucleotide
acaagcaacccactcccaaga

SEQ ID NO: 40903 - DNA, 21 bp, Artificial Sequence
  Description of Artificial Sequence: Synthetic oligonucleotide
acaagcaaccaaagcgcaatg

SEQ ID NO: 40904 - DNA, 21 bp, Artificial Sequence
  Description of Artificial Sequence: Synthetic oligonucleotide
acaagcaacacaagcatgagc

SEQ ID NO: 40905 - DNA, 21 bp, Artificial Sequence
  Description of Artificial Sequence: Synthetic oligonucleotide
acaagcaacgtcagaccatac

SEQ ID NO: 40906 - DNA, 21 bp, Artificial Sequence
  Description of Artificial Sequence: Synthetic oligonucleotide
acaagcaactaccacagcctc

SEQ ID NO: 40907 - DNA, 21 bp, Artificial Sequence
  Description of Artificial Sequence: Synthetic oligonucleotide
acaagcaactacctccaaaca

SEQ ID NO: 40908 - DNA, 21 bp, Artificial Sequence
  Description of Artificial Sequence: Synthetic oligonucleotide
acaagcccagcaagatacagc

SEQ ID NO: 40909 - DNA, 21 bp, Artificial Sequence
  Description of Artificial Sequence: Synthetic oligonucleotide
acaagcccagacttcagcctc

SEQ ID NO: 40910 - DNA, 21 bp, Artificial Sequence
  Description of Artificial Sequence: Synthetic oligonucleotide
acaagcccagacccaaacaaa

SEQ ID NO: 40911 - DNA, 21 bp, Artificial Sequence
  Description of Artificial Sequence: Synthetic oligonucleotide
acaagcccaatgcacacaatc

SEQ ID NO: 40912 - DNA, 21 bp, Artificial Sequence
  Description of Artificial Sequence: Synthetic oligonucleotide
acaagcccaccactcagcaca

SEQ ID NO: 40913 - DNA, 21 bp, Artificial Sequence
  Description of Artificial Sequence: Synthetic oligonucleotide
acaagcccaacaggaccaaca

SEQ ID NO: 40914 - DNA, 21 bp, Artificial Sequence
  Description of Artificial Sequence: Synthetic oligonucleotide
acaagcccagtcagccacgtc

SEQ ID NO: 40915 - DNA, 21 bp, Artificial Sequence
  Description of Artificial Sequence: Synthetic oligonucleotide
acaagccaagcagtccacctc

SEQ ID NO: 40916 - DNA, 21 bp, Artificial Sequence
  Description of Artificial Sequence: Synthetic oligonucleotide
acaagccaacacagacaagca

SEQ ID NO: 40917 - DNA, 21 bp, Artificial Sequence
  Description of Artificial Sequence: Synthetic oligonucleotide
acaagccaaatcaacagacaa

SEQ ID NO: 40918 - DNA, 21 bp, Artificial Sequence
  Description of Artificial Sequence: Synthetic oligonucleotide
acaagccaacaactcccacaa

SEQ ID NO: 40919 - DNA, 21 bp, Artificial Sequence
  Description of Artificial Sequence: Synthetic oligonucleotide
acaagccaaagaccaatgctc

SEQ ID NO: 40920 - DNA, 21 bp, Artificial Sequence
  Description of Artificial Sequence: Synthetic oligonucleotide
acaagccaaagataccaacca

SEQ ID NO: 40921 - DNA, 21 bp, Artificial Sequence
  Description of Artificial Sequence: Synthetic oligonucleotide
acaagccaagtcagaacaaca

SEQ ID NO: 40922 - DNA, 21 bp, Artificial Sequence
  Description of Artificial Sequence: Synthetic oligonucleotide
acaagcagagcaccagtcctc

SEQ ID NO: 40923 - DNA, 21 bp, Artificial Sequence
  Description of Artificial Sequence: Synthetic oligonucleotide
acaagcagagaccacgtcaga

SEQ ID NO: 40924 - DNA, 21 bp, Artificial Sequence
  Description of Artificial Sequence: Synthetic oligonucleotide
acaagcagagaaacatacaca

SEQ ID NO: 40925 - DNA, 21 bp, Artificial Sequence
  Description of Artificial Sequence: Synthetic oligonucleotide
acaagcagaaacgaagtcgca

SEQ ID NO: 40926 - DNA, 21 bp, Artificial Sequence
  Description of Artificial Sequence: Synthetic oligonucleotide
acaagcagaacaatcacaaca

SEQ ID NO: 40927 - DNA, 21 bp, Artificial Sequence
  Description of Artificial Sequence: Synthetic oligonucleotide
acaagcagaacaaacgaccca

SEQ ID NO: 40928 - DNA, 21 bp, Artificial Sequence
  Description of Artificial Sequence: Synthetic oligonucleotide
acaagcagagtcgacacaagc

SEQ ID NO: 40929 - DNA, 21 bp, Artificial Sequence
  Description of Artificial Sequence: Synthetic oligonucleotide
acaagcagcgcaagcgcagtc

SEQ ID NO: 40930 - DNA, 21 bp, Artificial Sequence
  Description of Artificial Sequence: Synthetic oligonucleotide
acaagcagcgacggactcgga

SEQ ID NO: 40931 - DNA, 21 bp, Artificial Sequence
  Description of Artificial Sequence: Synthetic oligonucleotide
acaagcagcggattcaaagtc

SEQ ID NO: 40932 - DNA, 21 bp, Artificial Sequence
  Description of Artificial Sequence: Synthetic oligonucleotide
acaagcagcggactcacagga

SEQ ID NO: 40933 - DNA, 21 bp, Artificial Sequence
  Description of Artificial Sequence: Synthetic oligonucleotide
acaagcagcggaacaaaccaa

SEQ ID NO: 40934 - DNA, 21 bp, Artificial Sequence
  Description of Artificial Sequence: Synthetic oligonucleotide
acaagcagccacagcgacgtc

SEQ ID NO: 40935 - DNA, 21 bp, Artificial Sequence
  Description of Artificial Sequence: Synthetic oligonucleotide
acaagcagccacacagaacac

SEQ ID NO: 40936 - DNA, 21 bp, Artificial Sequence
  Description of Artificial Sequence: Synthetic oligonucleotide
acaagcagcctcgcacacatc

SEQ ID NO: 40937 - DNA, 21 bp, Artificial Sequence
  Description of Artificial Sequence: Synthetic oligonucleotide
acaagcagcctcgcaacacac

SEQ ID NO: 40938 - DNA, 21 bp, Artificial Sequence
  Description of Artificial Sequence: Synthetic oligonucleotide
acaagcagcctcagactcgac

SEQ ID NO: 40939 - DNA, 21 bp, Artificial Sequence
  Description of Artificial Sequence: Synthetic oligonucleotide
acaagcagcctcagaccacca

SEQ ID NO: 40940 - DNA, 21 bp, Artificial Sequence
  Description of Artificial Sequence: Synthetic oligonucleotide
acaagcagcaactacccaagc

SEQ ID NO: 40941 - DNA, 21 bp, Artificial Sequence
  Description of Artificial Sequence: Synthetic oligonucleotide
acaagcagcccagcactcaca

SEQ ID NO: 40942 - DNA, 21 bp, Artificial Sequence
  Description of Artificial Sequence: Synthetic oligonucleotide
acaagcagcccactccaagga

SEQ ID NO: 40943 - DNA, 21 bp, Artificial Sequence
  Description of Artificial Sequence: Synthetic oligonucleotide
acaagcagccaacacagcaca

SEQ ID NO: 40944 - DNA, 21 bp, Artificial Sequence
  Description of Artificial Sequence: Synthetic oligonucleotide
acaagcagcagagcatacagc

SEQ ID NO: 40945 - DNA, 21 bp, Artificial Sequence
  Description of Artificial Sequence: Synthetic oligonucleotide
acaagcagcagactcccattc

SEQ ID NO: 40946 - DNA, 21 bp, Artificial Sequence
  Description of Artificial Sequence: Synthetic oligonucleotide
acaagcagcagcgcaagagac

SEQ ID NO: 40947 - DNA, 21 bp, Artificial Sequence
  Description of Artificial Sequence: Synthetic oligonucleotide
acaagcagcagcggactcaca

SEQ ID NO: 40948 - DNA, 21 bp, Artificial Sequence
  Description of Artificial Sequence: Synthetic oligonucleotide
acaagcagcagcaacagccca

SEQ ID NO: 40949 - DNA, 21 bp, Artificial Sequence
  Description of Artificial Sequence: Synthetic oligonucleotide
acaagcagcacaatgagccca

SEQ ID NO: 40950 - DNA, 21 bp, Artificial Sequence
  Description of Artificial Sequence: Synthetic oligonucleotide
acaagcagcacatacgaagaa

SEQ ID NO: 40951 - DNA, 21 bp, Artificial Sequence
  Description of Artificial Sequence: Synthetic oligonucleotide
acaagcagcgtcagcagcatc

SEQ ID NO: 40952 - DNA, 21 bp, Artificial Sequence
  Description of Artificial Sequence: Synthetic oligonucleotide
acaagcacagcagcactccca

SEQ ID NO: 40953 - DNA, 21 bp, Artificial Sequence
  Description of Artificial Sequence: Synthetic oligonucleotide
acaagcacattcgaaggaatg

SEQ ID NO: 40954 - DNA, 21 bp, Artificial Sequence
  Description of Artificial Sequence: Synthetic oligonucleotide
acaagcacaggacacacagtc

SEQ ID NO: 40955 - DNA, 21 bp, Artificial Sequence
  Description of Artificial Sequence: Synthetic oligonucleotide
acaagcacaggagtcagaatg

SEQ ID NO: 40956 - DNA, 21 bp, Artificial Sequence
  Description of Artificial Sequence: Synthetic oligonucleotide
acaagcacactcctcagcctc

SEQ ID NO: 40957 - DNA, 21 bp, Artificial Sequence
  Description of Artificial Sequence: Synthetic oligonucleotide
acaagcacaaacagcctcgca

SEQ ID NO: 40958 - DNA, 21 bp, Artificial Sequence
  Description of Artificial Sequence: Synthetic oligonucleotide
acaagcacaagcatggcaatc

SEQ ID NO: 40959 - DNA, 21 bp, Artificial Sequence
  Description of Artificial Sequence: Synthetic oligonucleotide
acaagcacaagcaacagaaac

SEQ ID NO: 40960 - DNA, 21 bp, Artificial Sequence
  Description of Artificial Sequence: Synthetic oligonucleotide
acaagcacaacaatgccactc

SEQ ID NO: 40961 - DNA, 21 bp, Artificial Sequence
  Description of Artificial Sequence: Synthetic oligonucleotide
acaagcacaacagtcggaaac

SEQ ID NO: 40962 - DNA, 21 bp, Artificial Sequence
  Description of Artificial Sequence: Synthetic oligonucleotide
acaagcacagtcagcccaaaa

SEQ ID NO: 40963 - DNA, 21 bp, Artificial Sequence
  Description of Artificial Sequence: Synthetic oligonucleotide
acaagcgtcgaaagaagctgg

SEQ ID NO: 40964 - DNA, 21 bp, Artificial Sequence
  Description of Artificial Sequence: Synthetic oligonucleotide
acaagcgtcggagaccacttc

SEQ ID NO: 40965 - DNA, 21 bp, Artificial Sequence
  Description of Artificial Sequence: Synthetic oligonucleotide
acaagcgtcggatggcaacca

SEQ ID NO: 40966 - DNA, 21 bp, Artificial Sequence
  Description of Artificial Sequence: Synthetic oligonucleotide
acaagcgtcaaaagcgcaagc

SEQ ID NO: 40967 - DNA, 21 bp, Artificial Sequence
  Description of Artificial Sequence: Synthetic oligonucleotide
acaagcgtccaaccaccacca

SEQ ID NO: 40968 - DNA, 21 bp, Artificial Sequence
  Description of Artificial Sequence: Synthetic oligonucleotide
acaagcgtcagccacgcagga

SEQ ID NO: 40969 - DNA, 21 bp, Artificial Sequence
  Description of Artificial Sequence: Synthetic oligonucleotide
acaagcgtcacaatgaaagtc

SEQ ID NO: 40970 - DNA, 21 bp, Artificial Sequence
  Description of Artificial Sequence: Synthetic oligonucleotide
acaagcgtcacaacacactac

SEQ ID NO: 40971 - DNA, 21 bp, Artificial Sequence
  Description of Artificial Sequence: Synthetic oligonucleotide
acaagctggcaaggagcagtc

SEQ ID NO: 40972 - DNA, 21 bp, Artificial Sequence
  Description of Artificial Sequence: Synthetic oligonucleotide
acaagctacggaccaaaagtc

SEQ ID NO: 40973 - DNA, 21 bp, Artificial Sequence
  Description of Artificial Sequence: Synthetic oligonucleotide
acaagctaccaaagaatcgaa

SEQ ID NO: 40974 - DNA, 21 bp, Artificial Sequence
  Description of Artificial Sequence: Synthetic oligonucleotide
acaacagcagcaaaagtcgga

SEQ ID NO: 40975 - DNA, 21 bp, Artificial Sequence
  Description of Artificial Sequence: Synthetic oligonucleotide
acaacagcagaatacacaaga

SEQ ID NO: 40976 - DNA, 21 bp, Artificial Sequence
  Description of Artificial Sequence: Synthetic oligonucleotide
acaacagcactcccacaattc

SEQ ID NO: 40977 - DNA, 21 bp, Artificial Sequence
  Description of Artificial Sequence: Synthetic oligonucleotide
acaacagcaatgagaggacca

SEQ ID NO: 40978 - DNA, 21 bp, Artificial Sequence
  Description of Artificial Sequence: Synthetic oligonucleotide
acaacagcaagacaattccaa

SEQ ID NO: 40979 - DNA, 21 bp, Artificial Sequence
  Description of Artificial Sequence: Synthetic oligonucleotide
acaacagcagtcagcagcaaa

SEQ ID NO: 40980 - DNA, 21 bp, Artificial Sequence
  Description of Artificial Sequence: Synthetic oligonucleotide
acaacagacgcagcaagacca

SEQ ID NO: 40981 - DNA, 21 bp, Artificial Sequence
  Description of Artificial Sequence: Synthetic oligonucleotide
acaacagactgctgcgcagca

SEQ ID NO: 40982 - DNA, 21 bp, Artificial Sequence
  Description of Artificial Sequence: Synthetic oligonucleotide
acaacagacgtctacgtcaga

SEQ ID NO: 40983 - DNA, 21 bp, Artificial Sequence
  Description of Artificial Sequence: Synthetic oligonucleotide
acaacagactacccactcagc

SEQ ID NO: 40984 - DNA, 21 bp, Artificial Sequence
  Description of Artificial Sequence: Synthetic oligonucleotide
acaacagaacacggatacgtc

SEQ ID NO: 40985 - DNA, 21 bp, Artificial Sequence
  Description of Artificial Sequence: Synthetic oligonucleotide
acaacattcctccaaaacgga

SEQ ID NO: 40986 - DNA, 21 bp, Artificial Sequence
  Description of Artificial Sequence: Synthetic oligonucleotide
acaacaggagcaatcgacatc

SEQ ID NO: 40987 - DNA, 21 bp, Artificial Sequence
  Description of Artificial Sequence: Synthetic oligonucleotide
acaacaggacacctcagcgtc

SEQ ID NO: 40988 - DNA, 21 bp, Artificial Sequence
  Description of Artificial Sequence: Synthetic oligonucleotide
acaacaggacacacactcatc

SEQ ID NO: 40989 - DNA, 21 bp, Artificial Sequence
  Description of Artificial Sequence: Synthetic oligonucleotide
acaacaggactcagcctcgga

SEQ ID NO: 40990 - DNA, 21 bp, Artificial Sequence
  Description of Artificial Sequence: Synthetic oligonucleotide
acaacaggaaacagcctccca

SEQ ID NO: 40991 - DNA, 21 bp, Artificial Sequence
  Description of Artificial Sequence: Synthetic oligonucleotide
acaacaggaaacacactcagc

SEQ ID NO: 40992 - DNA, 21 bp, Artificial Sequence
  Description of Artificial Sequence: Synthetic oligonucleotide
acaacaggaagcatcccacac

SEQ ID NO: 40993 - DNA, 21 bp, Artificial Sequence
  Description of Artificial Sequence: Synthetic oligonucleotide
acaacacacgcaccactcagc

SEQ ID NO: 40994 - DNA, 21 bp, Artificial Sequence
  Description of Artificial Sequence: Synthetic oligonucleotide
acaacacacgcaagctgcaca

SEQ ID NO: 40995 - DNA, 21 bp, Artificial Sequence
  Description of Artificial Sequence: Synthetic oligonucleotide
acaacacacgacgtctacaga

SEQ ID NO: 40996 - DNA, 21 bp, Artificial Sequence
  Description of Artificial Sequence: Synthetic oligonucleotide
acaacacacagcacagcagca

SEQ ID NO: 40997 - DNA, 21 bp, Artificial Sequence
  Description of Artificial Sequence: Synthetic oligonucleotide
acaacacacacacaatacaga

SEQ ID NO: 40998 - DNA, 21 bp, Artificial Sequence
  Description of Artificial Sequence: Synthetic oligonucleotide
acaacaatcctcggaccaatg

SEQ ID NO: 40999 - DNA, 21 bp, Artificial Sequence
  Description of Artificial Sequence: Synthetic oligonucleotide
acaacaaaaatcggagacgac

SEQ ID NO: 41000 - DNA, 21 bp, Artificial Sequence
  Description of Artificial Sequence: Synthetic oligonucleotide
acaacaaaaagcgcagacaca

SEQ ID NO: 41001 - DNA, 21 bp, Artificial Sequence
  Description of Artificial Sequence: Synthetic oligonucleotide
acaacaaaagtcggaagccca

SEQ ID NO: 41002 - DNA, 21 bp, Artificial Sequence
  Description of Artificial Sequence: Synthetic oligonucleotide
acaacactcgacccaagcctc

SEQ ID NO: 41003 - DNA, 21 bp, Artificial Sequence
  Description of Artificial Sequence: Synthetic oligonucleotide
acaacactcggaccaagcaga

SEQ ID NO: 41004 - DNA, 21 bp, Artificial Sequence
  Description of Artificial Sequence: Synthetic oligonucleotide
acaacactcggaagcgcagtc

SEQ ID NO: 41005 - DNA, 21 bp, Artificial Sequence
  Description of Artificial Sequence: Synthetic oligonucleotide
acaacactcagcggaggaaca

SEQ ID NO: 41006 - DNA, 21 bp, Artificial Sequence
  Description of Artificial Sequence: Synthetic oligonucleotide
acaacactcagcccaaacaaa

SEQ ID NO: 41007 - DNA, 21 bp, Artificial Sequence
  Description of Artificial Sequence: Synthetic oligonucleotide
acaacactcagcccaagagga

SEQ ID NO: 41008 - DNA, 21 bp, Artificial Sequence
  Description of Artificial Sequence: Synthetic oligonucleotide
acaacactcagcagcctcgca

SEQ ID NO: 41009 - DNA, 21 bp, Artificial Sequence
  Description of Artificial Sequence: Synthetic oligonucleotide
acaacaatggcactcggagca

SEQ ID NO: 41010 - DNA, 21 bp, Artificial Sequence
  Description of Artificial Sequence: Synthetic oligonucleotide
acaacaatgaaaccagaagca

SEQ ID NO: 41011 - DNA, 21 bp, Artificial Sequence
  Description of Artificial Sequence: Synthetic oligonucleotide
acaacaatgacactcgtcagc

SEQ ID NO: 41012 - DNA, 21 bp, Artificial Sequence
  Description of Artificial Sequence: Synthetic oligonucleotide
acaacaatgtacacaacaaca

SEQ ID NO: 41013 - DNA, 21 bp, Artificial Sequence
  Description of Artificial Sequence: Synthetic oligonucleotide
acaacaaacgcacaaggagga

SEQ ID NO: 41014 - DNA, 21 bp, Artificial Sequence
  Description of Artificial Sequence: Synthetic oligonucleotide
acaacaaacatcgtcagacaa

SEQ ID NO: 41015 - DNA, 21 bp, Artificial Sequence
  Description of Artificial Sequence: Synthetic oligonucleotide
acaacaaacctcgcaatgatg

SEQ ID NO: 41016 - DNA, 21 bp, Artificial Sequence
  Description of Artificial Sequence: Synthetic oligonucleotide
acaacaccaggatacgcacca

SEQ ID NO: 41017 - DNA, 21 bp, Artificial Sequence
  Description of Artificial Sequence: Synthetic oligonucleotide
acaacaccaatcagagacgga

SEQ ID NO: 41018 - DNA, 21 bp, Artificial Sequence
  Description of Artificial Sequence: Synthetic oligonucleotide
acaacaccactcacaaaagga

SEQ ID NO: 41019 - DNA, 21 bp, Artificial Sequence
  Description of Artificial Sequence: Synthetic oligonucleotide
acaacaccaccaatgcacctc

SEQ ID NO: 41020 - DNA, 21 bp, Artificial Sequence
  Description of Artificial Sequence: Synthetic oligonucleotide
acaacaccacaactcaacctc

SEQ ID NO: 41021 - DNA, 21 bp, Artificial Sequence
  Description of Artificial Sequence: Synthetic oligonucleotide
acaacaccaagactcctcagc

SEQ ID NO: 41022 - DNA, 21 bp, Artificial Sequence
  Description of Artificial Sequence: Synthetic oligonucleotide
acaacaccaacagacggagca

SEQ ID NO: 41023 - DNA, 21 bp, Artificial Sequence
  Description of Artificial Sequence: Synthetic oligonucleotide
acaacaccaacaaacagacca

SEQ ID NO: 41024 - DNA, 21 bp, Artificial Sequence
  Description of Artificial Sequence: Synthetic oligonucleotide
acaacacaagaacacctccca

SEQ ID NO: 41025 - DNA, 21 bp, Artificial Sequence
  Description of Artificial Sequence: Synthetic oligonucleotide
acaacacaaaacgtcaaccaa

SEQ ID NO: 41026 - DNA, 21 bp, Artificial Sequence
  Description of Artificial Sequence: Synthetic oligonucleotide
acaacacaaagcacatacgaa

SEQ ID NO: 41027 - DNA, 21 bp, Artificial Sequence
  Description of Artificial Sequence: Synthetic oligonucleotide
acaacacaaacagcagaaaca

SEQ ID NO: 41028 - DNA, 21 bp, Artificial Sequence
  Description of Artificial Sequence: Synthetic oligonucleotide
acaacaagagacccaccagca

SEQ ID NO: 41029 - DNA, 21 bp, Artificial Sequence
  Description of Artificial Sequence: Synthetic oligonucleotide
acaacaagaggagacgaacca

SEQ ID NO: 41030 - DNA, 21 bp, Artificial Sequence
  Description of Artificial Sequence: Synthetic oligonucleotide
acaacaagaatcgcagcagaa

SEQ ID NO: 41031 - DNA, 21 bp, Artificial Sequence
  Description of Artificial Sequence: Synthetic oligonucleotide
acaacaagactcgcactcgca

SEQ ID NO: 41032 - DNA, 21 bp, Artificial Sequence
  Description of Artificial Sequence: Synthetic oligonucleotide
acaacaagactcgtcagccca

SEQ ID NO: 41033 - DNA, 21 bp, Artificial Sequence
  Description of Artificial Sequence: Synthetic oligonucleotide
acaacaagaccaccacactac

SEQ ID NO: 41034 - DNA, 21 bp, Artificial Sequence
  Description of Artificial Sequence: Synthetic oligonucleotide
acaacaagaccaagcgaacca

SEQ ID NO: 41035 - DNA, 21 bp, Artificial Sequence
  Description of Artificial Sequence: Synthetic oligonucleotide
acaacaagacaaagcgacaac

SEQ ID NO: 41036 - DNA, 21 bp, Artificial Sequence
  Description of Artificial Sequence: Synthetic oligonucleotide
acaacaagaagcgcagcaagc

SEQ ID NO: 41037 - DNA, 21 bp, Artificial Sequence
  Description of Artificial Sequence: Synthetic oligonucleotide
acaacaagaagcgaaagcgga

SEQ ID NO: 41038 - DNA, 21 bp, Artificial Sequence
  Description of Artificial Sequence: Synthetic oligonucleotide
acaacaagaagcgtcctccaa

SEQ ID NO: 41039 - DNA, 21 bp, Artificial Sequence
  Description of Artificial Sequence: Synthetic oligonucleotide
acaacaagagtcgaaatggca

SEQ ID NO: 41040 - DNA, 21 bp, Artificial Sequence
  Description of Artificial Sequence: Synthetic oligonucleotide
acaacaagagtcggactcgtc

SEQ ID NO: 41041 - DNA, 21 bp, Artificial Sequence
  Description of Artificial Sequence: Synthetic oligonucleotide
acaacaagcgcagaccacagc

SEQ ID NO: 41042 - DNA, 21 bp, Artificial Sequence
  Description of Artificial Sequence: Synthetic oligonucleotide
acaacaagcgcaagagaactc

SEQ ID NO: 41043 - DNA, 21 bp, Artificial Sequence
  Description of Artificial Sequence: Synthetic oligonucleotide
acaacaagcggagacagactc

SEQ ID NO: 41044 - DNA, 21 bp, Artificial Sequence
  Description of Artificial Sequence: Synthetic oligonucleotide
acaacaagcggattcagccca

SEQ ID NO: 41045 - DNA, 21 bp, Artificial Sequence
  Description of Artificial Sequence: Synthetic oligonucleotide
acaacaagccacgcaccaagc

SEQ ID NO: 41046 - DNA, 21 bp, Artificial Sequence
  Description of Artificial Sequence: Synthetic oligonucleotide
acaacaagccacccactcatg

SEQ ID NO: 41047 - DNA, 21 bp, Artificial Sequence
  Description of Artificial Sequence: Synthetic oligonucleotide
acaacaagcatcggaagcgca

SEQ ID NO: 41048 - DNA, 21 bp, Artificial Sequence
  Description of Artificial Sequence: Synthetic oligonucleotide
acaacaagcctcggaagagtc

SEQ ID NO: 41049 - DNA, 21 bp, Artificial Sequence
  Description of Artificial Sequence: Synthetic oligonucleotide
acaacaagcctcatggaagca

SEQ ID NO: 41050 - DNA, 21 bp, Artificial Sequence
  Description of Artificial Sequence: Synthetic oligonucleotide
acaacaagcaacgtccacaca

SEQ ID NO: 41051 - DNA, 21 bp, Artificial Sequence
  Description of Artificial Sequence: Synthetic oligonucleotide
acaacaagcccactcagaaca

SEQ ID NO: 41052 - DNA, 21 bp, Artificial Sequence
  Description of Artificial Sequence: Synthetic oligonucleotide
acaacaagcccacaaagaagc

SEQ ID NO: 41053 - DNA, 21 bp, Artificial Sequence
  Description of Artificial Sequence: Synthetic oligonucleotide
acaacaagcagactcagcgca

SEQ ID NO: 41054 - DNA, 21 bp, Artificial Sequence
  Description of Artificial Sequence: Synthetic oligonucleotide
acaacaagcagcagcccaagc

SEQ ID NO: 41055 - DNA, 21 bp, Artificial Sequence
  Description of Artificial Sequence: Synthetic oligonucleotide
acaacaacagcaatgatcgtc

SEQ ID NO: 41056 - DNA, 21 bp, Artificial Sequence
  Description of Artificial Sequence: Synthetic oligonucleotide
acaacaacagcaagcttcgaa

SEQ ID NO: 41057 - DNA, 21 bp, Artificial Sequence
  Description of Artificial Sequence: Synthetic oligonucleotide
acaacaacagacaaaccactc

SEQ ID NO: 41058 - DNA, 21 bp, Artificial Sequence
  Description of Artificial Sequence: Synthetic oligonucleotide
acaacaacagacgtcgcaaga

SEQ ID NO: 41059 - DNA, 21 bp, Artificial Sequence
  Description of Artificial Sequence: Synthetic oligonucleotide
acaacaacagaaagaacaaga

SEQ ID NO: 41060 - DNA, 21 bp, Artificial Sequence
  Description of Artificial Sequence: Synthetic oligonucleotide
acaacaacaaaacacgtctac

SEQ ID NO: 41061 - DNA, 21 bp, Artificial Sequence
  Description of Artificial Sequence: Synthetic oligonucleotide
acaacaacaccaatcacaaac

SEQ ID NO: 41062 - DNA, 21 bp, Artificial Sequence
  Description of Artificial Sequence: Synthetic oligonucleotide
acaacaacaagagtcaacgca

SEQ ID NO: 41063 - DNA, 21 bp, Artificial Sequence
  Description of Artificial Sequence: Synthetic oligonucleotide
acaacaacagtcccaatcttc

SEQ ID NO: 41064 - DNA, 21 bp, Artificial Sequence
  Description of Artificial Sequence: Synthetic oligonucleotide
acaacaacagtcacatacctc

SEQ ID NO: 41065 - DNA, 21 bp, Artificial Sequence
  Description of Artificial Sequence: Synthetic oligonucleotide
acaacagtcgacgtcgtccac

SEQ ID NO: 41066 - DNA, 21 bp, Artificial Sequence
  Description of Artificial Sequence: Synthetic oligonucleotide
acaacagtcccagacagcgtc

SEQ ID NO: 41067 - DNA, 21 bp, Artificial Sequence
  Description of Artificial Sequence: Synthetic oligonucleotide
acaacagtcccaaacacaagc

SEQ ID NO: 41068 - DNA, 21 bp, Artificial Sequence
  Description of Artificial Sequence: Synthetic oligonucleotide
acaacagtcagagtccaccca

SEQ ID NO: 41069 - DNA, 21 bp, Artificial Sequence
  Description of Artificial Sequence: Synthetic oligonucleotide
acaacagtcgtcagcgacctc

SEQ ID NO: 41070 - DNA, 21 bp, Artificial Sequence
  Description of Artificial Sequence: Synthetic oligonucleotide
acaacagtcgtctacacagca

SEQ ID NO: 41071 - DNA, 21 bp, Artificial Sequence
  Description of Artificial Sequence: Synthetic oligonucleotide
acaacatacccaatccacgca

SEQ ID NO: 41072 - DNA, 21 bp, Artificial Sequence
  Description of Artificial Sequence: Synthetic oligonucleotide
acaacatacagcaacagcgca

SEQ ID NO: 41073 - DNA, 21 bp, Artificial Sequence
  Description of Artificial Sequence: Synthetic oligonucleotide
acagtcgcaggaaacatcgca

SEQ ID NO: 41074 - DNA, 21 bp, Artificial Sequence
  Description of Artificial Sequence: Synthetic oligonucleotide
acagtcgcacacagaatccca

SEQ ID NO: 41075 - DNA, 21 bp, Artificial Sequence
  Description of Artificial Sequence: Synthetic oligonucleotide
acagtcgcaatccacgaacca

SEQ ID NO: 41076 - DNA, 21 bp, Artificial Sequence
  Description of Artificial Sequence: Synthetic oligonucleotide
acagtcgcaccagacctcaac

SEQ ID NO: 41077 - DNA, 21 bp, Artificial Sequence
  Description of Artificial Sequence: Synthetic oligonucleotide
acagtctgcgtcagcagaaca

SEQ ID NO: 41078 - DNA, 21 bp, Artificial Sequence
  Description of Artificial Sequence: Synthetic oligonucleotide
acagtcgacgaatgggcagga

SEQ ID NO: 41079 - DNA, 21 bp, Artificial Sequence
  Description of Artificial Sequence: Synthetic oligonucleotide
acagtcgacggaagccaccaa

SEQ ID NO: 41080 - DNA, 21 bp, Artificial Sequence
  Description of Artificial Sequence: Synthetic oligonucleotide
acagtcgacagcagcggagtc

SEQ ID NO: 41081 - DNA, 21 bp, Artificial Sequence
  Description of Artificial Sequence: Synthetic oligonucleotide
acagtcgacacaaaacacagc

SEQ ID NO: 41082 - DNA, 21 bp, Artificial Sequence
  Description of Artificial Sequence: Synthetic oligonucleotide
acagtcgaaggagacagactc

SEQ ID NO: 41083 - DNA, 21 bp, Artificial Sequence
  Description of Artificial Sequence: Synthetic oligonucleotide
acagtcttcagcgaaagcgaa

SEQ ID NO: 41084 - DNA, 21 bp, Artificial Sequence
  Description of Artificial Sequence: Synthetic oligonucleotide
acagtcggacacctcaacgtc

SEQ ID NO: 41085 - DNA, 21 bp, Artificial Sequence
  Description of Artificial Sequence: Synthetic oligonucleotide
acagtcggaaactacagagac

SEQ ID NO: 41086 - DNA, 21 bp, Artificial Sequence
  Description of Artificial Sequence: Synthetic oligonucleotide
acagtcggaagcctcagcgac

SEQ ID NO: 41087 - DNA, 21 bp, Artificial Sequence
  Description of Artificial Sequence: Synthetic oligonucleotide
acagtcggaacactcatgctc

SEQ ID NO: 41088 - DNA, 21 bp, Artificial Sequence
  Description of Artificial Sequence: Synthetic oligonucleotide
acagtcggaacaccaccaaca

SEQ ID NO: 41089 - DNA, 21 bp, Artificial Sequence
  Description of Artificial Sequence: Synthetic oligonucleotide
acagtcggaacaagagcaatg

SEQ ID NO: 41090 - DNA, 21 bp, Artificial Sequence
  Description of Artificial Sequence: Synthetic oligonucleotide
acagtcggagtcgaaggaagc

SEQ ID NO: 41091 - DNA, 21 bp, Artificial Sequence
  Description of Artificial Sequence: Synthetic oligonucleotide
acagtcggagtcaacgcaagc

SEQ ID NO: 41092 - DNA, 21 bp, Artificial Sequence
  Description of Artificial Sequence: Synthetic oligonucleotide
acagtccacttcagccaagca

SEQ ID NO: 41093 - DNA, 21 bp, Artificial Sequence
  Description of Artificial Sequence: Synthetic oligonucleotide
acagtccacatcctcacacca

SEQ ID NO: 41094 - DNA, 21 bp, Artificial Sequence
  Description of Artificial Sequence: Synthetic oligonucleotide
acagtccacaacgtccaattc

SEQ ID NO: 41095 - DNA, 21 bp, Artificial Sequence
  Description of Artificial Sequence: Synthetic oligonucleotide
acagtccacagacaagtcgac

SEQ ID NO: 41096 - DNA, 21 bp, Artificial Sequence
  Description of Artificial Sequence: Synthetic oligonucleotide
acagtccacacattcagagaa

SEQ ID NO: 41097 - DNA, 21 bp, Artificial Sequence
  Description of Artificial Sequence: Synthetic oligonucleotide
acagtcaaaatcagcgaagga

SEQ ID NO: 41098 - DNA, 21 bp, Artificial Sequence
  Description of Artificial Sequence: Synthetic oligonucleotide
acagtcaaacaaagccaagtc

SEQ ID NO: 41099 - DNA, 21 bp, Artificial Sequence
  Description of Artificial Sequence: Synthetic oligonucleotide
acagtcaaagtcagcaaacca

SEQ ID NO: 41100 - DNA, 21 bp, Artificial Sequence
  Description of Artificial Sequence: Synthetic oligonucleotide
acagtcctcgcagcaagagga

SEQ ID NO: 41101 - DNA, 21 bp, Artificial Sequence
  Description of Artificial Sequence: Synthetic oligonucleotide
acagtcctcgcaagcccagtc

SEQ ID NO: 41102 - DNA, 21 bp, Artificial Sequence
  Description of Artificial Sequence: Synthetic oligonucleotide
acagtcctcgaaagccaaagc

SEQ ID NO: 41103 - DNA, 21 bp, Artificial Sequence
  Description of Artificial Sequence: Synthetic oligonucleotide
acagtcctcaaaacaagcatc

SEQ ID NO: 41104 - DNA, 21 bp, Artificial Sequence
  Description of Artificial Sequence: Synthetic oligonucleotide
acagtcatgagaacactcgca

SEQ ID NO: 41105 - DNA, 21 bp, Artificial Sequence
  Description of Artificial Sequence: Synthetic oligonucleotide
acagtcatgagagtcacagga

SEQ ID NO: 41106 - DNA, 21 bp, Artificial Sequence
  Description of Artificial Sequence: Synthetic oligonucleotide
acagtcaacggactcagagca

SEQ ID NO: 41107 - DNA, 21 bp, Artificial Sequence
  Description of Artificial Sequence: Synthetic oligonucleotide
acagtcaaccaccaaagcctc

SEQ ID NO: 41108 - DNA, 21 bp, Artificial Sequence
  Description of Artificial Sequence: Synthetic oligonucleotide
acagtcaacatcgaaacaaac

SEQ ID NO: 41109 - DNA, 21 bp, Artificial Sequence
  Description of Artificial Sequence: Synthetic oligonucleotide
acagtcaacaaagtctgcctc

SEQ ID NO: 41110 - DNA, 21 bp, Artificial Sequence
  Description of Artificial Sequence: Synthetic oligonucleotide
acagtcaactacaacgacatc

SEQ ID NO: 41111 - DNA, 21 bp, Artificial Sequence
  Description of Artificial Sequence: Synthetic oligonucleotide
acagtcccagcaggacacgaa

SEQ ID NO: 41112 - DNA, 21 bp, Artificial Sequence
  Description of Artificial Sequence: Synthetic oligonucleotide
acagtcccagcaagaacaatg

SEQ ID NO: 41113 - DNA, 21 bp, Artificial Sequence
  Description of Artificial Sequence: Synthetic oligonucleotide
acagtcccacaaagcgtcctc

SEQ ID NO: 41114 - DNA, 21 bp, Artificial Sequence
  Description of Artificial Sequence: Synthetic oligonucleotide
acagtcccaacagcagtcgca

SEQ ID NO: 41115 - DNA, 21 bp, Artificial Sequence
  Description of Artificial Sequence: Synthetic oligonucleotide
acagtcccagtcgcaatcgtc

SEQ ID NO: 41116 - DNA, 21 bp, Artificial Sequence
  Description of Artificial Sequence: Synthetic oligonucleotide
acagtccaagacacattcaga

SEQ ID NO: 41117 - DNA, 21 bp, Artificial Sequence
  Description of Artificial Sequence: Synthetic oligonucleotide
acagtccaaggaatcgacaga

SEQ ID NO: 41118 - DNA, 21 bp, Artificial Sequence
  Description of Artificial Sequence: Synthetic oligonucleotide
acagtccaacaacaagcaaac

SEQ ID NO: 41119 - DNA, 21 bp, Artificial Sequence
  Description of Artificial Sequence: Synthetic oligonucleotide
acagtccaaagcccactcctc

SEQ ID NO: 41120 - DNA, 21 bp, Artificial Sequence
  Description of Artificial Sequence: Synthetic oligonucleotide
acagtccaaagcagcgcaaca

SEQ ID NO: 41121 - DNA, 21 bp, Artificial Sequence
  Description of Artificial Sequence: Synthetic oligonucleotide
acagtccaaacaacaagcaca

SEQ ID NO: 41122 - DNA, 21 bp, Artificial Sequence
  Description of Artificial Sequence: Synthetic oligonucleotide
acagtccaagtcagactccca

SEQ ID NO: 41123 - DNA, 21 bp, Artificial Sequence
  Description of Artificial Sequence: Synthetic oligonucleotide
acagtcagaggaatcagcctc

SEQ ID NO: 41124 - DNA, 21 bp, Artificial Sequence
  Description of Artificial Sequence: Synthetic oligonucleotide
acagtcagaggactcgacaca

SEQ ID NO: 41125 - DNA, 21 bp, Artificial Sequence
  Description of Artificial Sequence: Synthetic oligonucleotide
acagtcagaggaagcccactc

SEQ ID NO: 41126 - DNA, 21 bp, Artificial Sequence
  Description of Artificial Sequence: Synthetic oligonucleotide
acagtcagactcgacggagtc

SEQ ID NO: 41127 - DNA, 21 bp, Artificial Sequence
  Description of Artificial Sequence: Synthetic oligonucleotide
acagtcagaccagtcagcagc

SEQ ID NO: 41128 - DNA, 21 bp, Artificial Sequence
  Description of Artificial Sequence: Synthetic oligonucleotide
acagtcagaagcccaagcatc

SEQ ID NO: 41129 - DNA, 21 bp, Artificial Sequence
  Description of Artificial Sequence: Synthetic oligonucleotide
acagtcagcgcacaaccaaga

SEQ ID NO: 41130 - DNA, 21 bp, Artificial Sequence
  Description of Artificial Sequence: Synthetic oligonucleotide
acagtcagcgacacaagcttc

SEQ ID NO: 41131 - DNA, 21 bp, Artificial Sequence
  Description of Artificial Sequence: Synthetic oligonucleotide
acagtcagcggaaaacacaca

SEQ ID NO: 41132 - DNA, 21 bp, Artificial Sequence
  Description of Artificial Sequence: Synthetic oligonucleotide
acagtcagccacggacaaaga

SEQ ID NO: 41133 - DNA, 21 bp, Artificial Sequence
  Description of Artificial Sequence: Synthetic oligonucleotide
acagtcagcaaaatgggagga

SEQ ID NO: 41134 - DNA, 21 bp, Artificial Sequence
  Description of Artificial Sequence: Synthetic oligonucleotide
acagtcagcagaaacgacgca

SEQ ID NO: 41135 - DNA, 21 bp, Artificial Sequence
  Description of Artificial Sequence: Synthetic oligonucleotide
acagtcagcagacaagtctgc

SEQ ID NO: 41136 - DNA, 21 bp, Artificial Sequence
  Description of Artificial Sequence: Synthetic oligonucleotide
acagtcagcacaacatgcgca

SEQ ID NO: 41137 - DNA, 21 bp, Artificial Sequence
  Description of Artificial Sequence: Synthetic oligonucleotide
acagtcagcgtcacaaaacca

SEQ ID NO: 41138 - DNA, 21 bp, Artificial Sequence
  Description of Artificial Sequence: Synthetic oligonucleotide
acagtcagcgtcgtcgacaaa

SEQ ID NO: 41139 - DNA, 21 bp, Artificial Sequence
  Description of Artificial Sequence: Synthetic oligonucleotide
acagtcacagaagcaagaaac

SEQ ID NO: 41140 - DNA, 21 bp, Artificial Sequence
  Description of Artificial Sequence: Synthetic oligonucleotide
acagtcacaggaaacggattc

SEQ ID NO: 41141 - DNA, 21 bp, Artificial Sequence
  Description of Artificial Sequence: Synthetic oligonucleotide
acagtcacacacaacatggaa

SEQ ID NO: 41142 - DNA, 21 bp, Artificial Sequence
  Description of Artificial Sequence: Synthetic oligonucleotide
acagtcacaaacccaagaaac

SEQ ID NO: 41143 - DNA, 21 bp, Artificial Sequence
  Description of Artificial Sequence: Synthetic oligonucleotide
acagtcacaccagcagtcaac

SEQ ID NO: 41144 - DNA, 21 bp, Artificial Sequence
  Description of Artificial Sequence: Synthetic oligonucleotide
acagtcacaagacacccaagc

SEQ ID NO: 41145 - DNA, 21 bp, Artificial Sequence
  Description of Artificial Sequence: Synthetic oligonucleotide
acagtcacaacagcagaaaga

SEQ ID NO: 41146 - DNA, 21 bp, Artificial Sequence
  Description of Artificial Sequence: Synthetic oligonucleotide
acagtcacaacaggaagatgg

SEQ ID NO: 41147 - DNA, 21 bp, Artificial Sequence
  Description of Artificial Sequence: Synthetic oligonucleotide
acagtcacaacaagacaagca

SEQ ID NO: 41148 - DNA, 21 bp, Artificial Sequence
  Description of Artificial Sequence: Synthetic oligonucleotide
acagtcgtcaaaagcggagac

SEQ ID NO: 41149 - DNA, 21 bp, Artificial Sequence
  Description of Artificial Sequence: Synthetic oligonucleotide
acagtcgtcctcacaagcgga

SEQ ID NO: 41150 - DNA, 21 bp, Artificial Sequence
  Description of Artificial Sequence: Synthetic oligonucleotide
acagtcgtcccaagcggaaga

SEQ ID NO: 41151 - DNA, 21 bp, Artificial Sequence
  Description of Artificial Sequence: Synthetic oligonucleotide
acagtcgtcccagtcccagga

SEQ ID NO: 41152 - DNA, 21 bp, Artificial Sequence
  Description of Artificial Sequence: Synthetic oligonucleotide
acagtctacagcggaagacca

SEQ ID NO: 41153 - DNA, 21 bp, Artificial Sequence
  Description of Artificial Sequence: Synthetic oligonucleotide
acagtctacagcccaaacaca

SEQ ID NO: 41154 - DNA, 21 bp, Artificial Sequence
  Description of Artificial Sequence: Synthetic oligonucleotide
acatggaacgcaacaatgaac

SEQ ID NO: 41155 - DNA, 21 bp, Artificial Sequence
  Description of Artificial Sequence: Synthetic oligonucleotide
acatggcaagacaacagagca

SEQ ID NO: 41156 - DNA, 21 bp, Artificial Sequence
  Description of Artificial Sequence: Synthetic oligonucleotide
acatggagcgcaacacaagga

SEQ ID NO: 41157 - DNA, 21 bp, Artificial Sequence
  Description of Artificial Sequence: Synthetic oligonucleotide
acatggagcagcggaacagac

SEQ ID NO: 41158 - DNA, 21 bp, Artificial Sequence
  Description of Artificial Sequence: Synthetic oligonucleotide
acatggagcacaaacgtcagc

SEQ ID NO: 41159 - DNA, 21 bp, Artificial Sequence
  Description of Artificial Sequence: Synthetic oligonucleotide
acatacgcaatcatcccagac

SEQ ID NO: 41160 - DNA, 21 bp, Artificial Sequence
  Description of Artificial Sequence: Synthetic oligonucleotide
acatacgcaaacagcgcattc

SEQ ID NO: 41161 - DNA, 21 bp, Artificial Sequence
  Description of Artificial Sequence: Synthetic oligonucleotide
acatacgcaaacgtcagcagc

SEQ ID NO: 41162 - DNA, 21 bp, Artificial Sequence
  Description of Artificial Sequence: Synthetic oligonucleotide
acatacgcaccaagcagagga

SEQ ID NO: 41163 - DNA, 21 bp, Artificial Sequence
  Description of Artificial Sequence: Synthetic oligonucleotide
acatacgcaccagtcgaaaca

SEQ ID NO: 41164 - DNA, 21 bp, Artificial Sequence
  Description of Artificial Sequence: Synthetic oligonucleotide
acatacgcaagaagccaagca

SEQ ID NO: 41165 - DNA, 21 bp, Artificial Sequence
  Description of Artificial Sequence: Synthetic oligonucleotide
acatacgaagcaagacaactc

SEQ ID NO: 41166 - DNA, 21 bp, Artificial Sequence
  Description of Artificial Sequence: Synthetic oligonucleotide
acatacgaaggaagactcaga

SEQ ID NO: 41167 - DNA, 21 bp, Artificial Sequence
  Description of Artificial Sequence: Synthetic oligonucleotide
acatacgaactcagcccacca

SEQ ID NO: 41168 - DNA, 21 bp, Artificial Sequence
  Description of Artificial Sequence: Synthetic oligonucleotide
acatacgaagtcagacaactc

SEQ ID NO: 41169 - DNA, 21 bp, Artificial Sequence
  Description of Artificial Sequence: Synthetic oligonucleotide
acatacggagcagcagtccaa

SEQ ID NO: 41170 - DNA, 21 bp, Artificial Sequence
  Description of Artificial Sequence: Synthetic oligonucleotide
acatacggaggaccaatgatc

SEQ ID NO: 41171 - DNA, 21 bp, Artificial Sequence
  Description of Artificial Sequence: Synthetic oligonucleotide
acatacggaatccaagcacca

SEQ ID NO: 41172 - DNA, 21 bp, Artificial Sequence
  Description of Artificial Sequence: Synthetic oligonucleotide
acatacggactcagcgtccca

SEQ ID NO: 41173 - DNA, 21 bp, Artificial Sequence
  Description of Artificial Sequence: Synthetic oligonucleotide
acatacggaatgacaggagca

SEQ ID NO: 41174 - DNA, 21 bp, Artificial Sequence
  Description of Artificial Sequence: Synthetic oligonucleotide
acataccacacaggagacgga

SEQ ID NO: 41175 - DNA, 21 bp, Artificial Sequence
  Description of Artificial Sequence: Synthetic oligonucleotide
acatacatcaacacaaaccca

SEQ ID NO: 41176 - DNA, 21 bp, Artificial Sequence
  Description of Artificial Sequence: Synthetic oligonucleotide
acatacaaagacgaacaacca

SEQ ID NO: 41177 - DNA, 21 bp, Artificial Sequence
  Description of Artificial Sequence: Synthetic oligonucleotide
acatacaaaggagcaccacca

SEQ ID NO: 41178 - DNA, 21 bp, Artificial Sequence
  Description of Artificial Sequence: Synthetic oligonucleotide
acatacaaaaaccaaacacac

SEQ ID NO: 41179 - DNA, 21 bp, Artificial Sequence
  Description of Artificial Sequence: Synthetic oligonucleotide
acatacctcatcgcaacacca

SEQ ID NO: 41180 - DNA, 21 bp, Artificial Sequence
  Description of Artificial Sequence: Synthetic oligonucleotide
acatacctcagcggagcatac

SEQ ID NO: 41181 - DNA, 21 bp, Artificial Sequence
  Description of Artificial Sequence: Synthetic oligonucleotide
acatacccactcccaaacgaa

SEQ ID NO: 41182 - DNA, 21 bp, Artificial Sequence
  Description of Artificial Sequence: Synthetic oligonucleotide
acatacccaccagcagcactc

SEQ ID NO: 41183 - DNA, 21 bp, Artificial Sequence
  Description of Artificial Sequence: Synthetic oligonucleotide
acatacccaacagaaccaaga

SEQ ID NO: 41184 - DNA, 21 bp, Artificial Sequence
  Description of Artificial Sequence: Synthetic oligonucleotide
acatacccaacactcctcgac

SEQ ID NO: 41185 - DNA, 21 bp, Artificial Sequence
  Description of Artificial Sequence: Synthetic oligonucleotide
acataccaagcaagcctcatc

SEQ ID NO: 41186 - DNA, 21 bp, Artificial Sequence
  Description of Artificial Sequence: Synthetic oligonucleotide
acataccaaagccaaagcgga

SEQ ID NO: 41187 - DNA, 21 bp, Artificial Sequence
  Description of Artificial Sequence: Synthetic oligonucleotide
acatacagcgcagaaacaatg

SEQ ID NO: 41188 - DNA, 21 bp, Artificial Sequence
  Description of Artificial Sequence: Synthetic oligonucleotide
acatacagcgcagtcctcgca

SEQ ID NO: 41189 - DNA, 21 bp, Artificial Sequence
  Description of Artificial Sequence: Synthetic oligonucleotide
acatacagccacgcaagagca

SEQ ID NO: 41190 - DNA, 21 bp, Artificial Sequence
  Description of Artificial Sequence: Synthetic oligonucleotide
acatacagcccaacagcaaca

SEQ ID NO: 41191 - DNA, 21 bp, Artificial Sequence
  Description of Artificial Sequence: Synthetic oligonucleotide
acatacagcacagcaatctac

SEQ ID NO: 41192 - DNA, 21 bp, Artificial Sequence
  Description of Artificial Sequence: Synthetic oligonucleotide
acatacagcgtcagcctcgca

SEQ ID NO: 41193 - DNA, 21 bp, Artificial Sequence
  Description of Artificial Sequence: Synthetic oligonucleotide
acatacagctacagcagcgca

SEQ ID NO: 41194 - DNA, 21 bp, Artificial Sequence
  Description of Artificial Sequence: Synthetic oligonucleotide
acatacacaggactcgcagca

SEQ ID NO: 41195 - DNA, 21 bp, Artificial Sequence
  Description of Artificial Sequence: Synthetic oligonucleotide
acatacacacaccacagcgtc

SEQ ID NO: 41196 - DNA, 21 bp, Artificial Sequence
  Description of Artificial Sequence: Synthetic oligonucleotide
acatacacaagcacatacgca

SEQ ID NO: 41197 - DNA, 21 bp, Artificial Sequence
  Description of Artificial Sequence: Synthetic oligonucleotide
acatacgtcgacgtcctccac

SEQ ID NO: 41198 - DNA, 21 bp, Artificial Sequence
  Description of Artificial Sequence: Synthetic oligonucleotide
acatacgtcggaagaggagca

SEQ ID NO: 41199 - DNA, 21 bp, Artificial Sequence
  Description of Artificial Sequence: Synthetic oligonucleotide
acatacgtcatgacaccaaaa

SEQ ID NO: 41200 - DNA, 21 bp, Artificial Sequence
  Description of Artificial Sequence: Synthetic oligonucleotide
acatactacgcagcagaaatc

SEQ ID NO: 41201 - DNA, 21 bp, Artificial Sequence
  Description of Artificial Sequence: Synthetic oligonucleotide
acatactacaaaaacacagga

SEQ ID NO: 41202 - DNA, 21 bp, Artificial Sequence
  Description of Artificial Sequence: Synthetic oligonucleotide
gtcgcagcaggacaaagccca

SEQ ID NO: 41203 - DNA, 21 bp, Artificial Sequence
  Description of Artificial Sequence: Synthetic oligonucleotide
gtcgcagcaagaagcgcacaa

SEQ ID NO: 41204 - DNA, 21 bp, Artificial Sequence
  Description of Artificial Sequence: Synthetic oligonucleotide
gtcgcagacgcaacaaaacca

SEQ ID NO: 41205 - DNA, 21 bp, Artificial Sequence
  Description of Artificial Sequence: Synthetic oligonucleotide
gtcgcagacttcgtcagatgc

SEQ ID NO: 41206 - DNA, 21 bp, Artificial Sequence
  Description of Artificial Sequence: Synthetic oligonucleotide
gtcgcagacaaagcactcgtc

SEQ ID NO: 41207 - DNA, 21 bp, Artificial Sequence
  Description of Artificial Sequence: Synthetic oligonucleotide
gtcgcagacctcagaccagaa

SEQ ID NO: 41208 - DNA, 21 bp, Artificial Sequence
  Description of Artificial Sequence: Synthetic oligonucleotide
gtcgcagacccaccaagaagc

SEQ ID NO: 41209 - DNA, 21 bp, Artificial Sequence
  Description of Artificial Sequence: Synthetic oligonucleotide
gtcgcagacagactcacaaca

SEQ ID NO: 41210 - DNA, 21 bp, Artificial Sequence
  Description of Artificial Sequence: Synthetic oligonucleotide
gtcgcagaacacccaaaaaga

SEQ ID NO: 41211 - DNA, 21 bp, Artificial Sequence
  Description of Artificial Sequence: Synthetic oligonucleotide
gtcgcagaacaacacagcctc

SEQ ID NO: 41212 - DNA, 21 bp, Artificial Sequence
  Description of Artificial Sequence: Synthetic oligonucleotide
gtcgcaggagcaggaacaaca

SEQ ID NO: 41213 - DNA, 21 bp, Artificial Sequence
  Description of Artificial Sequence: Synthetic oligonucleotide
gtcgcaggagcacacgcaaca

SEQ ID NO: 41214 - DNA, 21 bp, Artificial Sequence
  Description of Artificial Sequence: Synthetic oligonucleotide
gtcgcaggagacgcaaaaaac

SEQ ID NO: 41215 - DNA, 21 bp, Artificial Sequence
  Description of Artificial Sequence: Synthetic oligonucleotide
gtcgcaggaatcagaagccaa

SEQ ID NO: 41216 - DNA, 21 bp, Artificial Sequence
  Description of Artificial Sequence: Synthetic oligonucleotide
gtcgcaggactcaaccacaga

SEQ ID NO: 41217 - DNA, 21 bp, Artificial Sequence
  Description of Artificial Sequence: Synthetic oligonucleotide
gtcgcaggaccaacaggacca

SEQ ID NO: 41218 - DNA, 21 bp, Artificial Sequence
  Description of Artificial Sequence: Synthetic oligonucleotide
gtcgcaggacaaagaagcgga

SEQ ID NO: 41219 - DNA, 21 bp, Artificial Sequence
  Description of Artificial Sequence: Synthetic oligonucleotide
gtcgcaggacaaagcccacca

SEQ ID NO: 41220 - DNA, 21 bp, Artificial Sequence
  Description of Artificial Sequence: Synthetic oligonucleotide
gtcgcaggaagagaccaacca

SEQ ID NO: 41221 - DNA, 21 bp, Artificial Sequence
  Description of Artificial Sequence: Synthetic oligonucleotide
gtcgcaggaagagacgtcaga

SEQ ID NO: 41222 - DNA, 21 bp, Artificial Sequence
  Description of Artificial Sequence: Synthetic oligonucleotide
gtcgcaggaagagactaccaa

SEQ ID NO: 41223 - DNA, 21 bp, Artificial Sequence
  Description of Artificial Sequence: Synthetic oligonucleotide
gtcgcaggaagcgcaacagtc

SEQ ID NO: 41224 - DNA, 21 bp, Artificial Sequence
  Description of Artificial Sequence: Synthetic oligonucleotide
gtcgcaggaacagtcgaaaga

SEQ ID NO: 41225 - DNA, 21 bp, Artificial Sequence
  Description of Artificial Sequence: Synthetic oligonucleotide
gtcgcaggagtcagaacagca

SEQ ID NO: 41226 - DNA, 21 bp, Artificial Sequence
  Description of Artificial Sequence: Synthetic oligonucleotide
gtcgcaggagtcagcgaaatg

SEQ ID NO: 41227 - DNA, 21 bp, Artificial Sequence
  Description of Artificial Sequence: Synthetic oligonucleotide
gtcgcacacctcagcatgagc

SEQ ID NO: 41228 - DNA, 21 bp, Artificial Sequence
  Description of Artificial Sequence: Synthetic oligonucleotide
gtcgcacacagcctcccagca

SEQ ID NO: 41229 - DNA, 21 bp, Artificial Sequence
  Description of Artificial Sequence: Synthetic oligonucleotide
gtcgcacacagcacaaacgca

SEQ ID NO: 41230 - DNA, 21 bp, Artificial Sequence
  Description of Artificial Sequence: Synthetic oligonucleotide
gtcgcacacacaggagcaaga

SEQ ID NO: 41231 - DNA, 21 bp, Artificial Sequence
  Description of Artificial Sequence: Synthetic oligonucleotide
gtcgcacacacagtctacagc

SEQ ID NO: 41232 - DNA, 21 bp, Artificial Sequence
  Description of Artificial Sequence: Synthetic oligonucleotide
gtcgcacacgtccaaagcgac

SEQ ID NO: 41233 - DNA, 21 bp, Artificial Sequence
  Description of Artificial Sequence: Synthetic oligonucleotide
gtcgcacactacccagcaagc

SEQ ID NO: 41234 - DNA, 21 bp, Artificial Sequence
  Description of Artificial Sequence: Synthetic oligonucleotide
gtcgcaatccacggagcagtc

SEQ ID NO: 41235 - DNA, 21 bp, Artificial Sequence
  Description of Artificial Sequence: Synthetic oligonucleotide
gtcgcaatcccaagaggaagc

SEQ ID NO: 41236 - DNA, 21 bp, Artificial Sequence
  Description of Artificial Sequence: Synthetic oligonucleotide
gtcgcaatcagaagcccagca

SEQ ID NO: 41237 - DNA, 21 bp, Artificial Sequence
  Description of Artificial Sequence: Synthetic oligonucleotide
gtcgcactcgcaggacaatac

SEQ ID NO: 41238 - DNA, 21 bp, Artificial Sequence
  Description of Artificial Sequence: Synthetic oligonucleotide
gtcgcactccacccactcaac

SEQ ID NO: 41239 - DNA, 21 bp, Artificial Sequence
  Description of Artificial Sequence: Synthetic oligonucleotide
gtcgcactcatcaaatacagc

SEQ ID NO: 41240 - DNA, 21 bp, Artificial Sequence
  Description of Artificial Sequence: Synthetic oligonucleotide
gtcgcactcagcgcagcaaaa

SEQ ID NO: 41241 - DNA, 21 bp, Artificial Sequence
  Description of Artificial Sequence: Synthetic oligonucleotide
gtcgcaaacgaaacacactac

SEQ ID NO: 41242 - DNA, 21 bp, Artificial Sequence
  Description of Artificial Sequence: Synthetic oligonucleotide
gtcgcaaacggaaaaagccac

SEQ ID NO: 41243 - DNA, 21 bp, Artificial Sequence
  Description of Artificial Sequence: Synthetic oligonucleotide
gtcgcaaaccacatcgaagtc

SEQ ID NO: 41244 - DNA, 21 bp, Artificial Sequence
  Description of Artificial Sequence: Synthetic oligonucleotide
gtcgcaaaccaacaaggaaca

SEQ ID NO: 41245 - DNA, 21 bp, Artificial Sequence
  Description of Artificial Sequence: Synthetic oligonucleotide
gtcgcaaacagagacgtccaa

SEQ ID NO: 41246 - DNA, 21 bp, Artificial Sequence
  Description of Artificial Sequence: Synthetic oligonucleotide
gtcgcaaacgtcctcacaaac

SEQ ID NO: 41247 - DNA, 21 bp, Artificial Sequence
  Description of Artificial Sequence: Synthetic oligonucleotide
gtcgcaccagcaatcccagga

SEQ ID NO: 41248 - DNA, 21 bp, Artificial Sequence
  Description of Artificial Sequence: Synthetic oligonucleotide
gtcgcaccaatcggaagcgaa

SEQ ID NO: 41249 - DNA, 21 bp, Artificial Sequence
  Description of Artificial Sequence: Synthetic oligonucleotide
gtcgcaccactcatcccaaaa

SEQ ID NO: 41250 - DNA, 21 bp, Artificial Sequence
  Description of Artificial Sequence: Synthetic oligonucleotide
gtcgcaccaccaccacaaaaa

SEQ ID NO: 41251 - DNA, 21 bp, Artificial Sequence
  Description of Artificial Sequence: Synthetic oligonucleotide
gtcgcaccaccaccaagacac

SEQ ID NO: 41252 - DNA, 21 bp, Artificial Sequence
  Description of Artificial Sequence: Synthetic oligonucleotide
gtcgcaccaccatacagcgga

SEQ ID NO: 41253 - DNA, 21 bp, Artificial Sequence
  Description of Artificial Sequence: Synthetic oligonucleotide
gtcgcaccaagcgaaggaagc

SEQ ID NO: 41254 - DNA, 21 bp, Artificial Sequence
  Description of Artificial Sequence: Synthetic oligonucleotide
gtcgcaccaagccaaagactc

SEQ ID NO: 41255 - DNA, 21 bp, Artificial Sequence
  Description of Artificial Sequence: Synthetic oligonucleotide
gtcgcacaaagaagcggacca

SEQ ID NO: 41256 - DNA, 21 bp, Artificial Sequence
  Description of Artificial Sequence: Synthetic oligonucleotide
gtcgcacaaagcagaagcatc

SEQ ID NO: 41257 - DNA, 21 bp, Artificial Sequence
  Description of Artificial Sequence: Synthetic oligonucleotide
gtcgcaagagcacacatcgtc

SEQ ID NO: 41258 - DNA, 21 bp, Artificial Sequence
  Description of Artificial Sequence: Synthetic oligonucleotide
gtcgcaagaggaccaacaaca

SEQ ID NO: 41259 - DNA, 21 bp, Artificial Sequence
  Description of Artificial Sequence: Synthetic oligonucleotide
gtcgcaagacacagcaacgaa

SEQ ID NO: 41260 - DNA, 21 bp, Artificial Sequence
  Description of Artificial Sequence: Synthetic oligonucleotide
gtcgcaagaatcgacggaatg

SEQ ID NO: 41261 - DNA, 21 bp, Artificial Sequence
  Description of Artificial Sequence: Synthetic oligonucleotide
gtcgcaagactcccacaagtc

SEQ ID NO: 41262 - DNA, 21 bp, Artificial Sequence
  Description of Artificial Sequence: Synthetic oligonucleotide
gtcgcaagaccactcagcatg

SEQ ID NO: 41263 - DNA, 21 bp, Artificial Sequence
  Description of Artificial Sequence: Synthetic oligonucleotide
gtcgcaagaagcggaacaaca

SEQ ID NO: 41264 - DNA, 21 bp, Artificial Sequence
  Description of Artificial Sequence: Synthetic oligonucleotide
gtcgcaagaagcctccaagca

SEQ ID NO: 41265 - DNA, 21 bp, Artificial Sequence
  Description of Artificial Sequence: Synthetic oligonucleotide
gtcgcaagaagcaacctcgac

SEQ ID NO: 41266 - DNA, 21 bp, Artificial Sequence
  Description of Artificial Sequence: Synthetic oligonucleotide
gtcgcaagcgcactcggagga

SEQ ID NO: 41267 - DNA, 21 bp, Artificial Sequence
  Description of Artificial Sequence: Synthetic oligonucleotide
gtcgcaagcgcaagcccagca

SEQ ID NO: 41268 - DNA, 21 bp, Artificial Sequence
  Description of Artificial Sequence: Synthetic oligonucleotide
gtcgcaagcggagtcgtcttc

SEQ ID NO: 41269 - DNA, 21 bp, Artificial Sequence
  Description of Artificial Sequence: Synthetic oligonucleotide
gtcgcaagccacatcacacca

SEQ ID NO: 41270 - DNA, 21 bp, Artificial Sequence
  Description of Artificial Sequence: Synthetic oligonucleotide
gtcgcaagcaaaatcatcgac

SEQ ID NO: 41271 - DNA, 21 bp, Artificial Sequence
  Description of Artificial Sequence: Synthetic oligonucleotide
gtcgcaagcctccaagtcgga

SEQ ID NO: 41272 - DNA, 21 bp, Artificial Sequence
  Description of Artificial Sequence: Synthetic oligonucleotide
gtcgcaagcctcacacacgac

SEQ ID NO: 41273 - DNA, 21 bp, Artificial Sequence
  Description of Artificial Sequence: Synthetic oligonucleotide
gtcgcaagcaacaacaaagca

SEQ ID NO: 41274 - DNA, 21 bp, Artificial Sequence
  Description of Artificial Sequence: Synthetic oligonucleotide
gtcgcaagcagagcaccaaca

SEQ ID NO: 41275 - DNA, 21 bp, Artificial Sequence
  Description of Artificial Sequence: Synthetic oligonucleotide
gtcgcaagcagcaaaacacca

SEQ ID NO: 41276 - DNA, 21 bp, Artificial Sequence
  Description of Artificial Sequence: Synthetic oligonucleotide
gtcgcaagcagcagcggaatc

SEQ ID NO: 41277 - DNA, 21 bp, Artificial Sequence
  Description of Artificial Sequence: Synthetic oligonucleotide
gtcgcaagcacaggaagccca

SEQ ID NO: 41278 - DNA, 21 bp, Artificial Sequence
  Description of Artificial Sequence: Synthetic oligonucleotide
gtcgcaagcgtcaaaatgctc

SEQ ID NO: 41279 - DNA, 21 bp, Artificial Sequence
  Description of Artificial Sequence: Synthetic oligonucleotide
gtcgcaagcgtcagaacaaac

SEQ ID NO: 41280 - DNA, 21 bp, Artificial Sequence
  Description of Artificial Sequence: Synthetic oligonucleotide
gtcgcaagctacagcggattc

SEQ ID NO: 41281 - DNA, 21 bp, Artificial Sequence
  Description of Artificial Sequence: Synthetic oligonucleotide
gtcgcaagctacagcagagaa

SEQ ID NO: 41282 - DNA, 21 bp, Artificial Sequence
  Description of Artificial Sequence: Synthetic oligonucleotide
gtcgcaacagcaagcgtcaca

SEQ ID NO: 41283 - DNA, 21 bp, Artificial Sequence
  Description of Artificial Sequence: Synthetic oligonucleotide
gtcgcaacagaactcgcagga

SEQ ID NO: 41284 - DNA, 21 bp, Artificial Sequence
  Description of Artificial Sequence: Synthetic oligonucleotide
gtcgcaacactcaactacgtc

SEQ ID NO: 41285 - DNA, 21 bp, Artificial Sequence
  Description of Artificial Sequence: Synthetic oligonucleotide
gtcgcaacactcagaggaaac

SEQ ID NO: 41286 - DNA, 21 bp, Artificial Sequence
  Description of Artificial Sequence: Synthetic oligonucleotide
gtcgcaacaatggtcgtccca

SEQ ID NO: 41287 - DNA, 21 bp, Artificial Sequence
  Description of Artificial Sequence: Synthetic oligonucleotide
gtcgcaacaaacaacgacgtc

SEQ ID NO: 41288 - DNA, 21 bp, Artificial Sequence
  Description of Artificial Sequence: Synthetic oligonucleotide
gtcgcaacaaacagcatcagc

SEQ ID NO: 41289 - DNA, 21 bp, Artificial Sequence
  Description of Artificial Sequence: Synthetic oligonucleotide
gtcgcaacaaacacatacctc

SEQ ID NO: 41290 - DNA, 21 bp, Artificial Sequence
  Description of Artificial Sequence: Synthetic oligonucleotide
gtcgcaacaccaacagtcctc

SEQ ID NO: 41291 - DNA, 21 bp, Artificial Sequence
  Description of Artificial Sequence: Synthetic oligonucleotide
gtcgcaacaagagacagctac

SEQ ID NO: 41292 - DNA, 21 bp, Artificial Sequence
  Description of Artificial Sequence: Synthetic oligonucleotide
gtcgcaacaagagtcgtcgaa

SEQ ID NO: 41293 - DNA, 21 bp, Artificial Sequence
  Description of Artificial Sequence: Synthetic oligonucleotide
gtcgcaacaagcgtcagacca

SEQ ID NO: 41294 - DNA, 21 bp, Artificial Sequence
  Description of Artificial Sequence: Synthetic oligonucleotide
gtcgcagtcatgatgccaagc

SEQ ID NO: 41295 - DNA, 21 bp, Artificial Sequence
  Description of Artificial Sequence: Synthetic oligonucleotide
gtcgcagtcaacagcagaagc

SEQ ID NO: 41296 - DNA, 21 bp, Artificial Sequence
  Description of Artificial Sequence: Synthetic oligonucleotide
gtcgcagtcagaacaagcgac

SEQ ID NO: 41297 - DNA, 21 bp, Artificial Sequence
  Description of Artificial Sequence: Synthetic oligonucleotide
gtcgcagtcagcgcaccactc

SEQ ID NO: 41298 - DNA, 21 bp, Artificial Sequence
  Description of Artificial Sequence: Synthetic oligonucleotide
gtcgcagtcagcacagtcaca

SEQ ID NO: 41299 - DNA, 21 bp, Artificial Sequence
  Description of Artificial Sequence: Synthetic oligonucleotide
gtcgcatacgacacagcagtc

SEQ ID NO: 41300 - DNA, 21 bp, Artificial Sequence
  Description of Artificial Sequence: Synthetic oligonucleotide
gtcgcatacccagcaagaagc

SEQ ID NO: 41301 - DNA, 21 bp, Artificial Sequence
  Description of Artificial Sequence: Synthetic oligonucleotide
gtctgcggaccaccattccac

SEQ ID NO: 41302 - DNA, 21 bp, Artificial Sequence
  Description of Artificial Sequence: Synthetic oligonucleotide
gtctgcaacagcgtcggatac

SEQ ID NO: 41303 - DNA, 21 bp, Artificial Sequence
  Description of Artificial Sequence: Synthetic oligonucleotide
gtcgacgcaaaagcaaacgac

SEQ ID NO: 41304 - DNA, 21 bp, Artificial Sequence
  Description of Artificial Sequence: Synthetic oligonucleotide
gtcgacgacttcccaagatgc

SEQ ID NO: 41305 - DNA, 21 bp, Artificial Sequence
  Description of Artificial Sequence: Synthetic oligonucleotide
gtcgacgacctcagagcaaga

SEQ ID NO: 41306 - DNA, 21 bp, Artificial Sequence
  Description of Artificial Sequence: Synthetic oligonucleotide
gtcgacgaaatcagaagacca

SEQ ID NO: 41307 - DNA, 21 bp, Artificial Sequence
  Description of Artificial Sequence: Synthetic oligonucleotide
gtcgacttcgaacacagccaa

SEQ ID NO: 41308 - DNA, 21 bp, Artificial Sequence
  Description of Artificial Sequence: Synthetic oligonucleotide
gtcgacggagcaagacaacca

SEQ ID NO: 41309 - DNA, 21 bp, Artificial Sequence
  Description of Artificial Sequence: Synthetic oligonucleotide
gtcgacggactcggaagcaaa

SEQ ID NO: 41310 - DNA, 21 bp, Artificial Sequence
  Description of Artificial Sequence: Synthetic oligonucleotide
gtcgacggagtcagaggagca

SEQ ID NO: 41311 - DNA, 21 bp, Artificial Sequence
  Description of Artificial Sequence: Synthetic oligonucleotide
gtcgacaaactcagccacaca

SEQ ID NO: 41312 - DNA, 21 bp, Artificial Sequence
  Description of Artificial Sequence: Synthetic oligonucleotide
gtcgacaaaccacacctcgca

SEQ ID NO: 41313 - DNA, 21 bp, Artificial Sequence
  Description of Artificial Sequence: Synthetic oligonucleotide
gtcgacctccaatgcgcacca

SEQ ID NO: 41314 - DNA, 21 bp, Artificial Sequence
  Description of Artificial Sequence: Synthetic oligonucleotide
gtcgacctcagaccatacgca

SEQ ID NO: 41315 - DNA, 21 bp, Artificial Sequence
  Description of Artificial Sequence: Synthetic oligonucleotide
gtcgacaacgcagcacaaagc

SEQ ID NO: 41316 - DNA, 21 bp, Artificial Sequence
  Description of Artificial Sequence: Synthetic oligonucleotide
gtcgacaacctcgcaagagca

SEQ ID NO: 41317 - DNA, 21 bp, Artificial Sequence
  Description of Artificial Sequence: Synthetic oligonucleotide
gtcgacaacacactcacagac

SEQ ID NO: 41318 - DNA, 21 bp, Artificial Sequence
  Description of Artificial Sequence: Synthetic oligonucleotide
gtcgacccaggaagacaccac

SEQ ID NO: 41319 - DNA, 21 bp, Artificial Sequence
  Description of Artificial Sequence: Synthetic oligonucleotide
gtcgacccaatgccagcactc

SEQ ID NO: 41320 - DNA, 21 bp, Artificial Sequence
  Description of Artificial Sequence: Synthetic oligonucleotide
gtcgacccaagatggcaccca

SEQ ID NO: 41321 - DNA, 21 bp, Artificial Sequence
  Description of Artificial Sequence: Synthetic oligonucleotide
gtcgaccaacacacaatcgca

SEQ ID NO: 41322 - DNA, 21 bp, Artificial Sequence
  Description of Artificial Sequence: Synthetic oligonucleotide
gtcgaccaagtcaacaaccca

SEQ ID NO: 41323 - DNA, 21 bp, Artificial Sequence
  Description of Artificial Sequence: Synthetic oligonucleotide
gtcgacagacaccacagccca

SEQ ID NO: 41324 - DNA, 21 bp, Artificial Sequence
  Description of Artificial Sequence: Synthetic oligonucleotide
gtcgacagaagaccagacagc

SEQ ID NO: 41325 - DNA, 21 bp, Artificial Sequence
  Description of Artificial Sequence: Synthetic oligonucleotide
gtcgacagaagaacaacaaca

SEQ ID NO: 41326 - DNA, 21 bp, Artificial Sequence
  Description of Artificial Sequence: Synthetic oligonucleotide
gtcgacagcctcacaccatac

SEQ ID NO: 41327 - DNA, 21 bp, Artificial Sequence
  Description of Artificial Sequence: Synthetic oligonucleotide
gtcgacagcccaagcgcacca

SEQ ID NO: 41328 - DNA, 21 bp, Artificial Sequence
  Description of Artificial Sequence: Synthetic oligonucleotide
gtcgacagcagcacaaacctc

SEQ ID NO: 41329 - DNA, 21 bp, Artificial Sequence
  Description of Artificial Sequence: Synthetic oligonucleotide
gtcgacacactcatgaacaga

SEQ ID NO: 41330 - DNA, 21 bp, Artificial Sequence
  Description of Artificial Sequence: Synthetic oligonucleotide
gtcgacacaccaggaaacaga

SEQ ID NO: 41331 - DNA, 21 bp, Artificial Sequence
  Description of Artificial Sequence: Synthetic oligonucleotide
gtcgacacaagaagagaaagc

SEQ ID NO: 41332 - DNA, 21 bp, Artificial Sequence
  Description of Artificial Sequence: Synthetic oligonucleotide
gtcgacacaagcctcgaatgc

SEQ ID NO: 41333 - DNA, 21 bp, Artificial Sequence
  Description of Artificial Sequence: Synthetic oligonucleotide
gtcgacacaacaaaattccaa

SEQ ID NO: 41334 - DNA, 21 bp, Artificial Sequence
  Description of Artificial Sequence: Synthetic oligonucleotide
gtcgacgtcagaaaacaccca

SEQ ID NO: 41335 - DNA, 21 bp, Artificial Sequence
  Description of Artificial Sequence: Synthetic oligonucleotide
gtcgactacgcagtcagcatg

SEQ ID NO: 41336 - DNA, 21 bp, Artificial Sequence
  Description of Artificial Sequence: Synthetic oligonucleotide
gtcgaagcaacaagcagagtc

SEQ ID NO: 41337 - DNA, 21 bp, Artificial Sequence
  Description of Artificial Sequence: Synthetic oligonucleotide
gtcgaaggagtcagaagcgca

SEQ ID NO: 41338 - DNA, 21 bp, Artificial Sequence
  Description of Artificial Sequence: Synthetic oligonucleotide
gtcgaacacaacagcctcaac

SEQ ID NO: 41339 - DNA, 21 bp, Artificial Sequence
  Description of Artificial Sequence: Synthetic oligonucleotide
gtcgaacacaacacaccattc

SEQ ID NO: 41340 - DNA, 21 bp, Artificial Sequence
  Description of Artificial Sequence: Synthetic oligonucleotide
gtcgaacacagagtcagcaca

SEQ ID NO: 41341 - DNA, 21 bp, Artificial Sequence
  Description of Artificial Sequence: Synthetic oligonucleotide
gtcgaacacagcacaaacgtc

SEQ ID NO: 41342 - DNA, 21 bp, Artificial Sequence
  Description of Artificial Sequence: Synthetic oligonucleotide
gtcgaaatcaaaacaagaagc

SEQ ID NO: 41343 - DNA, 21 bp, Artificial Sequence
  Description of Artificial Sequence: Synthetic oligonucleotide
gtcgaaatcagcagcgtcagc

SEQ ID NO: 41344 - DNA, 21 bp, Artificial Sequence
  Description of Artificial Sequence: Synthetic oligonucleotide
gtcgaaaaagaaatgaacagc

SEQ ID NO: 41345 - DNA, 21 bp, Artificial Sequence
  Description of Artificial Sequence: Synthetic oligonucleotide
gtcgaaaaaacaccaatggaa

SEQ ID NO: 41346 - DNA, 21 bp, Artificial Sequence
  Description of Artificial Sequence: Synthetic oligonucleotide
gtcgaaaaagtcagcatgctc

SEQ ID NO: 41347 - DNA, 21 bp, Artificial Sequence
  Description of Artificial Sequence: Synthetic oligonucleotide
gtcgaaaaatacaaaaacctc

SEQ ID NO: 41348 - DNA, 21 bp, Artificial Sequence
  Description of Artificial Sequence: Synthetic oligonucleotide
gtcgaactcaaccaaggagac

SEQ ID NO: 41349 - DNA, 21 bp, Artificial Sequence
  Description of Artificial Sequence: Synthetic oligonucleotide
gtcgaaaacgcaagaccacaa

SEQ ID NO: 41350 - DNA, 21 bp, Artificial Sequence
  Description of Artificial Sequence: Synthetic oligonucleotide
gtcgaaccagcattcacagac

SEQ ID NO: 41351 - DNA, 21 bp, Artificial Sequence
  Description of Artificial Sequence: Synthetic oligonucleotide
gtcgaaccaagaaaaagcgca

SEQ ID NO: 41352 - DNA, 21 bp, Artificial Sequence
  Description of Artificial Sequence: Synthetic oligonucleotide
gtcgaaccaagaagcatgtac

SEQ ID NO: 41353 - DNA, 21 bp, Artificial Sequence
  Description of Artificial Sequence: Synthetic oligonucleotide
gtcgaaccaacactcacaaga

SEQ ID NO: 41354 - DNA, 21 bp, Artificial Sequence
  Description of Artificial Sequence: Synthetic oligonucleotide
gtcgaaccagtcctccacaca

SEQ ID NO: 41355 - DNA, 21 bp, Artificial Sequence
  Description of Artificial Sequence: Synthetic oligonucleotide
gtcgaaagagacgacagaaca

SEQ ID NO: 41356 - DNA, 21 bp, Artificial Sequence
  Description of Artificial Sequence: Synthetic oligonucleotide
gtcgaaagagacatcgacagc

SEQ ID NO: 41357 - DNA, 21 bp, Artificial Sequence
  Description of Artificial Sequence: Synthetic oligonucleotide
gtcgaaagaccagtcaacaaa

SEQ ID NO: 41358 - DNA, 21 bp, Artificial Sequence
  Description of Artificial Sequence: Synthetic oligonucleotide
gtcgaaagagtcagaacactc

SEQ ID NO: 41359 - DNA, 21 bp, Artificial Sequence
  Description of Artificial Sequence: Synthetic oligonucleotide
gtcgaaagcgacacaagctgg

SEQ ID NO: 41360 - DNA, 21 bp, Artificial Sequence
  Description of Artificial Sequence: Synthetic oligonucleotide
gtcgaaagcaacagcccaatg

SEQ ID NO: 41361 - DNA, 21 bp, Artificial Sequence
  Description of Artificial Sequence: Synthetic oligonucleotide
gtcgaaagcaacagcagcttc

SEQ ID NO: 41362 - DNA, 21 bp, Artificial Sequence
  Description of Artificial Sequence: Synthetic oligonucleotide
gtcgaaagcagcccactccca

SEQ ID NO: 41363 - DNA, 21 bp, Artificial Sequence
  Description of Artificial Sequence: Synthetic oligonucleotide
gtcgaaacaggacacaacaaa

SEQ ID NO: 41364 - DNA, 21 bp, Artificial Sequence
  Description of Artificial Sequence: Synthetic oligonucleotide
gtcgaaacaaacagaaacaga

SEQ ID NO: 41365 - DNA, 21 bp, Artificial Sequence
  Description of Artificial Sequence: Synthetic oligonucleotide
gtcgaaacaaacgtcaaactc

SEQ ID NO: 41366 - DNA, 21 bp, Artificial Sequence
  Description of Artificial Sequence: Synthetic oligonucleotide
gtcgaaacaccactcagaaaa

SEQ ID NO: 41367 - DNA, 21 bp, Artificial Sequence
  Description of Artificial Sequence: Synthetic oligonucleotide
gtcgaagtcaacacactccac

SEQ ID NO: 41368 - DNA, 21 bp, Artificial Sequence
  Description of Artificial Sequence: Synthetic oligonucleotide
gtcttcgacaacacagtcaga

SEQ ID NO: 41369 - DNA, 21 bp, Artificial Sequence
  Description of Artificial Sequence: Synthetic oligonucleotide
gtcttcggagcaaacgtcgca

SEQ ID NO: 41370 - DNA, 21 bp, Artificial Sequence
  Description of Artificial Sequence: Synthetic oligonucleotide
gtcttcggagacacactcctc

SEQ ID NO: 41371 - DNA, 21 bp, Artificial Sequence
  Description of Artificial Sequence: Synthetic oligonucleotide
gtcttcggaatcccaagccca

SEQ ID NO: 41372 - DNA, 21 bp, Artificial Sequence
  Description of Artificial Sequence: Synthetic oligonucleotide
gtcttccacaaaggattcgac

SEQ ID NO: 41373 - DNA, 21 bp, Artificial Sequence
  Description of Artificial Sequence: Synthetic oligonucleotide
gtcttccacaaaagcgaaaca

SEQ ID NO: 41374 - DNA, 21 bp, Artificial Sequence
  Description of Artificial Sequence: Synthetic oligonucleotide
gtcttccacacaccagaacca

SEQ ID NO: 41375 - DNA, 21 bp, Artificial Sequence
  Description of Artificial Sequence: Synthetic oligonucleotide
gtcttcctcgaaccaagcagc

SEQ ID NO: 41376 - DNA, 21 bp, Artificial Sequence
  Description of Artificial Sequence: Synthetic oligonucleotide
gtcttcccacaaagcacacca

SEQ ID NO: 41377 - DNA, 21 bp, Artificial Sequence
  Description of Artificial Sequence: Synthetic oligonucleotide
gtcttccaagacagcatccca

SEQ ID NO: 41378 - DNA, 21 bp, Artificial Sequence
  Description of Artificial Sequence: Synthetic oligonucleotide
gtcttccaaggacaaatcgtc

SEQ ID NO: 41379 - DNA, 21 bp, Artificial Sequence
  Description of Artificial Sequence: Synthetic oligonucleotide
gtcttccaaacaaacaacgca

SEQ ID NO: 41380 - DNA, 21 bp, Artificial Sequence
  Description of Artificial Sequence: Synthetic oligonucleotide
gtcttcagaacaacaagccca

SEQ ID NO: 41381 - DNA, 21 bp, Artificial Sequence
  Description of Artificial Sequence: Synthetic oligonucleotide
gtcttcagcggaagacaagca

SEQ ID NO: 41382 - DNA, 21 bp, Artificial Sequence
  Description of Artificial Sequence: Synthetic oligonucleotide
gtcttcagcaacagcgcagtc

SEQ ID NO: 41383 - DNA, 21 bp, Artificial Sequence
  Description of Artificial Sequence: Synthetic oligonucleotide
gtcttcacacacgaaagaaca

SEQ ID NO: 41384 - DNA, 21 bp, Artificial Sequence
  Description of Artificial Sequence: Synthetic oligonucleotide
gtcttcacacacagcgaccca

SEQ ID NO: 41385 - DNA, 21 bp, Artificial Sequence
  Description of Artificial Sequence: Synthetic oligonucleotide
gtcttcacaaacccaagactc

SEQ ID NO: 41386 - DNA, 21 bp, Artificial Sequence
  Description of Artificial Sequence: Synthetic oligonucleotide
gtcttcacaccagaagaaaga

SEQ ID NO: 41387 - DNA, 21 bp, Artificial Sequence
  Description of Artificial Sequence: Synthetic oligonucleotide
gtcttcacaagcgtcacaaca

SEQ ID NO: 41388 - DNA, 21 bp, Artificial Sequence
  Description of Artificial Sequence: Synthetic oligonucleotide
gtcttcacaacaggaagccca

SEQ ID NO: 41389 - DNA, 21 bp, Artificial Sequence
  Description of Artificial Sequence: Synthetic oligonucleotide
gtcttcgtcggactcaaacca

SEQ ID NO: 41390 - DNA, 21 bp, Artificial Sequence
  Description of Artificial Sequence: Synthetic oligonucleotide
gtcggagcagcaagcgaaaga

SEQ ID NO: 41391 - DNA, 21 bp, Artificial Sequence
  Description of Artificial Sequence: Synthetic oligonucleotide
gtcggagcagacacaagagac

SEQ ID NO: 41392 - DNA, 21 bp, Artificial Sequence
  Description of Artificial Sequence: Synthetic oligonucleotide
gtcggagcaccaaacagaaca

SEQ ID NO: 41393 - DNA, 21 bp, Artificial Sequence
  Description of Artificial Sequence: Synthetic oligonucleotide
gtcggagcaccagtcgaaaga

SEQ ID NO: 41394 - DNA, 21 bp, Artificial Sequence
  Description of Artificial Sequence: Synthetic oligonucleotide
gtcggagcaagagcaccagca

SEQ ID NO: 41395 - DNA, 21 bp, Artificial Sequence
  Description of Artificial Sequence: Synthetic oligonucleotide
gtcggagcaagccacgcaaaa

SEQ ID NO: 41396 - DNA, 21 bp, Artificial Sequence
  Description of Artificial Sequence: Synthetic oligonucleotide
gtcggagcagtctacagccaa

SEQ ID NO: 41397 - DNA, 21 bp, Artificial Sequence
  Description of Artificial Sequence: Synthetic oligonucleotide
gtcggagacgacagcgtcctc

SEQ ID NO: 41398 - DNA, 21 bp, Artificial Sequence
  Description of Artificial Sequence: Synthetic oligonucleotide
gtcggagaaatcatggcaatg

SEQ ID NO: 41399 - DNA, 21 bp, Artificial Sequence
  Description of Artificial Sequence: Synthetic oligonucleotide
gtcggagaaagaagcagcaga

SEQ ID NO: 41400 - DNA, 21 bp, Artificial Sequence
  Description of Artificial Sequence: Synthetic oligonucleotide
gtcggaggagacgacgacatg

SEQ ID NO: 41401 - DNA, 21 bp, Artificial Sequence
  Description of Artificial Sequence: Synthetic oligonucleotide
gtcggaggagacctctgcgac

SEQ ID NO: 41402 - DNA, 21 bp, Artificial Sequence
  Description of Artificial Sequence: Synthetic oligonucleotide
gtcggaggagacagcgtccca

SEQ ID NO: 41403 - DNA, 21 bp, Artificial Sequence
  Description of Artificial Sequence: Synthetic oligonucleotide
gtcggaggaggacacggaaca

SEQ ID NO: 41404 - DNA, 21 bp, Artificial Sequence
  Description of Artificial Sequence: Synthetic oligonucleotide
gtcggaggaggaacaggacca

SEQ ID NO: 41405 - DNA, 21 bp, Artificial Sequence
  Description of Artificial Sequence: Synthetic oligonucleotide
gtcggaggaatggacctcaca

SEQ ID NO: 41406 - DNA, 21 bp, Artificial Sequence
  Description of Artificial Sequence: Synthetic oligonucleotide
gtcggaggaccaatcggatac

SEQ ID NO: 41407 - DNA, 21 bp, Artificial Sequence
  Description of Artificial Sequence: Synthetic oligonucleotide
gtcggacacccactcaaacca

SEQ ID NO: 41408 - DNA, 21 bp, Artificial Sequence
  Description of Artificial Sequence: Synthetic oligonucleotide
gtcggacacagcctcatgcca

SEQ ID NO: 41409 - DNA, 21 bp, Artificial Sequence
  Description of Artificial Sequence: Synthetic oligonucleotide
gtcggacacagcatgccacca

SEQ ID NO: 41410 - DNA, 21 bp, Artificial Sequence
  Description of Artificial Sequence: Synthetic oligonucleotide
gtcggacacagcgtcacactc

SEQ ID NO: 41411 - DNA, 21 bp, Artificial Sequence
  Description of Artificial Sequence: Synthetic oligonucleotide
gtcggaaaagacatgagcgtc

SEQ ID NO: 41412 - DNA, 21 bp, Artificial Sequence
  Description of Artificial Sequence: Synthetic oligonucleotide
gtcggaaaaggagaagcaagc

SEQ ID NO: 41413 - DNA, 21 bp, Artificial Sequence
  Description of Artificial Sequence: Synthetic oligonucleotide
gtcggaaaactcgtcaactgc

SEQ ID NO: 41414 - DNA, 21 bp, Artificial Sequence
  Description of Artificial Sequence: Synthetic oligonucleotide
gtcggactcccaccagcacca

SEQ ID NO: 41415 - DNA, 21 bp, Artificial Sequence
  Description of Artificial Sequence: Synthetic oligonucleotide
gtcggactccaacacaacctc

SEQ ID NO: 41416 - DNA, 21 bp, Artificial Sequence
  Description of Artificial Sequence: Synthetic oligonucleotide
gtcggactcacaagcacagtc

SEQ ID NO: 41417 - DNA, 21 bp, Artificial Sequence
  Description of Artificial Sequence: Synthetic oligonucleotide
gtcggaatgagaatcccagca

SEQ ID NO: 41418 - DNA, 21 bp, Artificial Sequence
  Description of Artificial Sequence: Synthetic oligonucleotide
gtcggaaacaaaggaatcagc

SEQ ID NO: 41419 - DNA, 21 bp, Artificial Sequence
  Description of Artificial Sequence: Synthetic oligonucleotide
gtcggaaacctccaagcattc

SEQ ID NO: 41420 - DNA, 21 bp, Artificial Sequence
  Description of Artificial Sequence: Synthetic oligonucleotide
gtcggaaacagagcattcatc

SEQ ID NO: 41421 - DNA, 21 bp, Artificial Sequence
  Description of Artificial Sequence: Synthetic oligonucleotide
gtcggaaacagcctccacgca

SEQ ID NO: 41422 - DNA, 21 bp, Artificial Sequence
  Description of Artificial Sequence: Synthetic oligonucleotide
gtcggaaactacgtcggaaga

SEQ ID NO: 41423 - DNA, 21 bp, Artificial Sequence
  Description of Artificial Sequence: Synthetic oligonucleotide
gtcggaccaacaggaagcgca

SEQ ID NO: 41424 - DNA, 21 bp, Artificial Sequence
  Description of Artificial Sequence: Synthetic oligonucleotide
gtcggacaaaacgcagaatgg

SEQ ID NO: 41425 - DNA, 21 bp, Artificial Sequence
  Description of Artificial Sequence: Synthetic oligonucleotide
gtcggaagactcacaatgcca

SEQ ID NO: 41426 - DNA, 21 bp, Artificial Sequence
  Description of Artificial Sequence: Synthetic oligonucleotide
gtcggaagaagcgtcctcgac

SEQ ID NO: 41427 - DNA, 21 bp, Artificial Sequence
  Description of Artificial Sequence: Synthetic oligonucleotide
gtcggaagcttcatcccaaca

SEQ ID NO: 41428 - DNA, 21 bp, Artificial Sequence
  Description of Artificial Sequence: Synthetic oligonucleotide
gtcggaagcggagcaccagaa

SEQ ID NO: 41429 - DNA, 21 bp, Artificial Sequence
  Description of Artificial Sequence: Synthetic oligonucleotide
gtcggaagcggactcgacaac

SEQ ID NO: 41430 - DNA, 21 bp, Artificial Sequence
  Description of Artificial Sequence: Synthetic oligonucleotide
gtcggaagcatcgacctccca

SEQ ID NO: 41431 - DNA, 21 bp, Artificial Sequence
  Description of Artificial Sequence: Synthetic oligonucleotide
gtcggaagcaaagcactcctc

SEQ ID NO: 41432 - DNA, 21 bp, Artificial Sequence
  Description of Artificial Sequence: Synthetic oligonucleotide
gtcggaagcctctggctcgac

SEQ ID NO: 41433 - DNA, 21 bp, Artificial Sequence
  Description of Artificial Sequence: Synthetic oligonucleotide
gtcggaagcccaaaaccaaca

SEQ ID NO: 41434 - DNA, 21 bp, Artificial Sequence
  Description of Artificial Sequence: Synthetic oligonucleotide
gtcggaagccaatacctccca

SEQ ID NO: 41435 - DNA, 21 bp, Artificial Sequence
  Description of Artificial Sequence: Synthetic oligonucleotide
gtcggaagcagagcaacaagc

SEQ ID NO: 41436 - DNA, 21 bp, Artificial Sequence
  Description of Artificial Sequence: Synthetic oligonucleotide
gtcggaagcagcaaaggagca

SEQ ID NO: 41437 - DNA, 21 bp, Artificial Sequence
  Description of Artificial Sequence: Synthetic oligonucleotide
gtcggaagcagcgtcgacgca

SEQ ID NO: 41438 - DNA, 21 bp, Artificial Sequence
  Description of Artificial Sequence: Synthetic oligonucleotide
gtcggaagcacaggaagaaca

SEQ ID NO: 41439 - DNA, 21 bp, Artificial Sequence
  Description of Artificial Sequence: Synthetic oligonucleotide
gtcggaagcacaagagaactc

SEQ ID NO: 41440 - DNA, 21 bp, Artificial Sequence
  Description of Artificial Sequence: Synthetic oligonucleotide
gtcggaagctacatcacagtc

SEQ ID NO: 41441 - DNA, 21 bp, Artificial Sequence
  Description of Artificial Sequence: Synthetic oligonucleotide
gtcggaacagtcacaagacca

SEQ ID NO: 41442 - DNA, 21 bp, Artificial Sequence
  Description of Artificial Sequence: Synthetic oligonucleotide
gtcggagtcacaatgccatac

SEQ ID NO: 41443 - DNA, 21 bp, Artificial Sequence
  Description of Artificial Sequence: Synthetic oligonucleotide
gtcggatacgaagcacacgca

SEQ ID NO: 41444 - DNA, 21 bp, Artificial Sequence
  Description of Artificial Sequence: Synthetic oligonucleotide
gtcggatacccagcaaaccca

SEQ ID NO: 41445 - DNA, 21 bp, Artificial Sequence
  Description of Artificial Sequence: Synthetic oligonucleotide
gtccacgcagaactcatgaga

SEQ ID NO: 41446 - DNA, 21 bp, Artificial Sequence
  Description of Artificial Sequence: Synthetic oligonucleotide
gtccacgcaagcacagcagtc

SEQ ID NO: 41447 - DNA, 21 bp, Artificial Sequence
  Description of Artificial Sequence: Synthetic oligonucleotide
gtccacgacggaggaagacac

SEQ ID NO: 41448 - DNA, 21 bp, Artificial Sequence
  Description of Artificial Sequence: Synthetic oligonucleotide
gtccacgacggaaaaatcaga

SEQ ID NO: 41449 - DNA, 21 bp, Artificial Sequence
  Description of Artificial Sequence: Synthetic oligonucleotide
gtccacgaaaacggaagcgtc

SEQ ID NO: 41450 - DNA, 21 bp, Artificial Sequence
  Description of Artificial Sequence: Synthetic oligonucleotide
gtccacggagcagcacaaaca

SEQ ID NO: 41451 - DNA, 21 bp, Artificial Sequence
  Description of Artificial Sequence: Synthetic oligonucleotide
gtccacggaccaatgcaacac

SEQ ID NO: 41452 - DNA, 21 bp, Artificial Sequence
  Description of Artificial Sequence: Synthetic oligonucleotide
gtccacggaacagacccagac

SEQ ID NO: 41453 - DNA, 21 bp, Artificial Sequence
  Description of Artificial Sequence: Synthetic oligonucleotide
gtccaccacaacctcacacca

SEQ ID NO: 41454 - DNA, 21 bp, Artificial Sequence
  Description of Artificial Sequence: Synthetic oligonucleotide
gtccacaaaagcgcagactac

SEQ ID NO: 41455 - DNA, 21 bp, Artificial Sequence
  Description of Artificial Sequence: Synthetic oligonucleotide
gtccacctcccaagcatgcca

SEQ ID NO: 41456 - DNA, 21 bp, Artificial Sequence
  Description of Artificial Sequence: Synthetic oligonucleotide
gtccacctcccaacactcgca

SEQ ID NO: 41457 - DNA, 21 bp, Artificial Sequence
  Description of Artificial Sequence: Synthetic oligonucleotide
gtccacaacggaggaagaagc

SEQ ID NO: 41458 - DNA, 21 bp, Artificial Sequence
  Description of Artificial Sequence: Synthetic oligonucleotide
gtccacaacggactcacacca

SEQ ID NO: 41459 - DNA, 21 bp, Artificial Sequence
  Description of Artificial Sequence: Synthetic oligonucleotide
gtccacaacatgctcaaagca

SEQ ID NO: 41460 - DNA, 21 bp, Artificial Sequence
  Description of Artificial Sequence: Synthetic oligonucleotide
gtccacccacacagcgtcaac

SEQ ID NO: 41461 - DNA, 21 bp, Artificial Sequence
  Description of Artificial Sequence: Synthetic oligonucleotide
gtccacccaagaatgctcaca

SEQ ID NO: 41462 - DNA, 21 bp, Artificial Sequence
  Description of Artificial Sequence: Synthetic oligonucleotide
gtccacccaagcagcgtcaca

SEQ ID NO: 41463 - DNA, 21 bp, Artificial Sequence
  Description of Artificial Sequence: Synthetic oligonucleotide
gtccacccagtcctcgcaagc

SEQ ID NO: 41464 - DNA, 21 bp, Artificial Sequence
  Description of Artificial Sequence: Synthetic oligonucleotide
gtccaccaagcaagattcgca

SEQ ID NO: 41465 - DNA, 21 bp, Artificial Sequence
  Description of Artificial Sequence: Synthetic oligonucleotide
gtccaccaagaaagaagctgg

SEQ ID NO: 41466 - DNA, 21 bp, Artificial Sequence
  Description of Artificial Sequence: Synthetic oligonucleotide
gtccacagacaactcgaagac

SEQ ID NO: 41467 - DNA, 21 bp, Artificial Sequence
  Description of Artificial Sequence: Synthetic oligonucleotide
gtccacagaacacaagacagc

SEQ ID NO: 41468 - DNA, 21 bp, Artificial Sequence
  Description of Artificial Sequence: Synthetic oligonucleotide
gtccacagcttcaaactcgga

SEQ ID NO: 41469 - DNA, 21 bp, Artificial Sequence
  Description of Artificial Sequence: Synthetic oligonucleotide
gtccacagcaacagcccaagc

SEQ ID NO: 41470 - DNA, 21 bp, Artificial Sequence
  Description of Artificial Sequence: Synthetic oligonucleotide
gtccacagcccacaacaaagc

SEQ ID NO: 41471 - DNA, 21 bp, Artificial Sequence
  Description of Artificial Sequence: Synthetic oligonucleotide
gtccacagcagcatcaacgca

SEQ ID NO: 41472 - DNA, 21 bp, Artificial Sequence
  Description of Artificial Sequence: Synthetic oligonucleotide
gtccacacaccaatcggaaca

SEQ ID NO: 41473 - DNA, 21 bp, Artificial Sequence
  Description of Artificial Sequence: Synthetic oligonucleotide
gtccacacaagcacaatcagc

SEQ ID NO: 41474 - DNA, 21 bp, Artificial Sequence
  Description of Artificial Sequence: Synthetic oligonucleotide
gtccacacaacaggaatgctc

SEQ ID NO: 41475 - DNA, 21 bp, Artificial Sequence
  Description of Artificial Sequence: Synthetic oligonucleotide
gtccacgtcagcacaatgcca

SEQ ID NO: 41476 - DNA, 21 bp, Artificial Sequence
  Description of Artificial Sequence: Synthetic oligonucleotide
gtccacgtcacaggaaacctc

SEQ ID NO: 41477 - DNA, 21 bp, Artificial Sequence
  Description of Artificial Sequence: Synthetic oligonucleotide
gtcatcgcaagcgacatcagc

SEQ ID NO: 41478 - DNA, 21 bp, Artificial Sequence
  Description of Artificial Sequence: Synthetic oligonucleotide
gtcatcgcaacagacagactc

SEQ ID NO: 41479 - DNA, 21 bp, Artificial Sequence
  Description of Artificial Sequence: Synthetic oligonucleotide
gtcatcgcagtcgacagaatg

SEQ ID NO: 41480 - DNA, 21 bp, Artificial Sequence
  Description of Artificial Sequence: Synthetic oligonucleotide
gtcatcgacagcgaactcgac

SEQ ID NO: 41481 - DNA, 21 bp, Artificial Sequence
  Description of Artificial Sequence: Synthetic oligonucleotide
gtcatcgacagccaaaaaaaa

SEQ ID NO: 41482 - DNA, 21 bp, Artificial Sequence
  Description of Artificial Sequence: Synthetic oligonucleotide
gtcatcgaagcaagcagaaac

SEQ ID NO: 41483 - DNA, 21 bp, Artificial Sequence
  Description of Artificial Sequence: Synthetic oligonucleotide
gtcatcggaaaaggaacacac

SEQ ID NO: 41484 - DNA, 21 bp, Artificial Sequence
  Description of Artificial Sequence: Synthetic oligonucleotide
gtcatccacacaatgggagca

SEQ ID NO: 41485 - DNA, 21 bp, Artificial Sequence
  Description of Artificial Sequence: Synthetic oligonucleotide
gtcatcatcgaaacaagcgca

SEQ ID NO: 41486 - DNA, 21 bp, Artificial Sequence
  Description of Artificial Sequence: Synthetic oligonucleotide
gtcatcctcgacaaagcagtc

SEQ ID NO: 41487 - DNA, 21 bp, Artificial Sequence
  Description of Artificial Sequence: Synthetic oligonucleotide
gtcatcctcaaaggagcacca

SEQ ID NO: 41488 - DNA, 21 bp, Artificial Sequence
  Description of Artificial Sequence: Synthetic oligonucleotide
gtcatcctcacaagcgcagtc

SEQ ID NO: 41489 - DNA, 21 bp, Artificial Sequence
  Description of Artificial Sequence: Synthetic oligonucleotide
gtcatcaacggactcgcaagc

SEQ ID NO: 41490 - DNA, 21 bp, Artificial Sequence
  Description of Artificial Sequence: Synthetic oligonucleotide
gtcatcaacggactcggagtc

SEQ ID NO: 41491 - DNA, 21 bp, Artificial Sequence
  Description of Artificial Sequence: Synthetic oligonucleotide
gtcatcaacaacacaggaaac

SEQ ID NO: 41492 - DNA, 21 bp, Artificial Sequence
  Description of Artificial Sequence: Synthetic oligonucleotide
gtcatcccaccaatgagaagc

SEQ ID NO: 41493 - DNA, 21 bp, Artificial Sequence
  Description of Artificial Sequence: Synthetic oligonucleotide
gtcatcccaccatgggacatc

SEQ ID NO: 41494 - DNA, 21 bp, Artificial Sequence
  Description of Artificial Sequence: Synthetic oligonucleotide
gtcatcccaagaacactccaa

SEQ ID NO: 41495 - DNA, 21 bp, Artificial Sequence
  Description of Artificial Sequence: Synthetic oligonucleotide
gtcatccaactcagaggagca

SEQ ID NO: 41496 - DNA, 21 bp, Artificial Sequence
  Description of Artificial Sequence: Synthetic oligonucleotide
gtcatcagaccaagcacacac

SEQ ID NO: 41497 - DNA, 21 bp, Artificial Sequence
  Description of Artificial Sequence: Synthetic oligonucleotide
gtcatcagcggactcaacatg

SEQ ID NO: 41498 - DNA, 21 bp, Artificial Sequence
  Description of Artificial Sequence: Synthetic oligonucleotide
gtcatcagccacaaaacaaac

SEQ ID NO: 41499 - DNA, 21 bp, Artificial Sequence
  Description of Artificial Sequence: Synthetic oligonucleotide
gtcatcagcctcagcgaactc

SEQ ID NO: 41500 - DNA, 21 bp, Artificial Sequence
  Description of Artificial Sequence: Synthetic oligonucleotide
gtcatcagcaacacaagagac

SEQ ID NO: 41501 - DNA, 21 bp, Artificial Sequence
  Description of Artificial Sequence: Synthetic oligonucleotide
gtcatcagcagaaaaggacca

SEQ ID NO: 41502 - DNA, 21 bp, Artificial Sequence
  Description of Artificial Sequence: Synthetic oligonucleotide
gtcatcagcagcgcagacctc

SEQ ID NO: 41503 - DNA, 21 bp, Artificial Sequence
  Description of Artificial Sequence: Synthetic oligonucleotide
gtcatcagcagcttcgcagaa

SEQ ID NO: 41504 - DNA, 21 bp, Artificial Sequence
  Description of Artificial Sequence: Synthetic oligonucleotide
gtcatcagcacaagcctccca

SEQ ID NO: 41505 - DNA, 21 bp, Artificial Sequence
  Description of Artificial Sequence: Synthetic oligonucleotide
gtcatcagcgtcccagcaagc

SEQ ID NO: 41506 - DNA, 21 bp, Artificial Sequence
  Description of Artificial Sequence: Synthetic oligonucleotide
gtcatcacagaaaaaagcgca

SEQ ID NO: 41507 - DNA, 21 bp, Artificial Sequence
  Description of Artificial Sequence: Synthetic oligonucleotide
gtcatcacaagaagcggaaca

SEQ ID NO: 41508 - DNA, 21 bp, Artificial Sequence
  Description of Artificial Sequence: Synthetic oligonucleotide
gtcatcacaagcctcggacca

SEQ ID NO: 41509 - DNA, 21 bp, Artificial Sequence
  Description of Artificial Sequence: Synthetic oligonucleotide
gtcatcacaagcacaggagca

SEQ ID NO: 41510 - DNA, 21 bp, Artificial Sequence
  Description of Artificial Sequence: Synthetic oligonucleotide
gtcatcgtcctcggaccagtc

SEQ ID NO: 41511 - DNA, 21 bp, Artificial Sequence
  Description of Artificial Sequence: Synthetic oligonucleotide
gtcatcgtcccagacgtctgg

SEQ ID NO: 41512 - DNA, 21 bp, Artificial Sequence
  Description of Artificial Sequence: Synthetic oligonucleotide
gtcaaagacgcattcgcacca

SEQ ID NO: 41513 - DNA, 21 bp, Artificial Sequence
  Description of Artificial Sequence: Synthetic oligonucleotide
gtcaaagacgaccacagatgc

SEQ ID NO: 41514 - DNA, 21 bp, Artificial Sequence
  Description of Artificial Sequence: Synthetic oligonucleotide
gtcaaagacctcccacaagca

SEQ ID NO: 41515 - DNA, 21 bp, Artificial Sequence
  Description of Artificial Sequence: Synthetic oligonucleotide
gtcaaagacccaagaatgagc

SEQ ID NO: 41516 - DNA, 21 bp, Artificial Sequence
  Description of Artificial Sequence: Synthetic oligonucleotide
gtcaaagacagcacaatcgga

SEQ ID NO: 41517 - DNA, 21 bp, Artificial Sequence
  Description of Artificial Sequence: Synthetic oligonucleotide
gtcaaattccaaccaagcctc

SEQ ID NO: 41518 - DNA, 21 bp, Artificial Sequence
  Description of Artificial Sequence: Synthetic oligonucleotide
gtcaaaggacaactctgctgc

SEQ ID NO: 41519 - DNA, 21 bp, Artificial Sequence
  Description of Artificial Sequence: Synthetic oligonucleotide
gtcaaaggatacagcaactac

SEQ ID NO: 41520 - DNA, 21 bp, Artificial Sequence
  Description of Artificial Sequence: Synthetic oligonucleotide
gtcaaactcgcaatggaagac

SEQ ID NO: 41521 - DNA, 21 bp, Artificial Sequence
  Description of Artificial Sequence: Synthetic oligonucleotide
gtcaaactcggaatccaagca

SEQ ID NO: 41522 - DNA, 21 bp, Artificial Sequence
  Description of Artificial Sequence: Synthetic oligonucleotide
gtcaaaaacgcagtcacacca

SEQ ID NO: 41523 - DNA, 21 bp, Artificial Sequence
  Description of Artificial Sequence: Synthetic oligonucleotide
gtcaaaaactgcatggtcgaa

SEQ ID NO: 41524 - DNA, 21 bp, Artificial Sequence
  Description of Artificial Sequence: Synthetic oligonucleotide
gtcaaaaacccaatcagctac

SEQ ID NO: 41525 - DNA, 21 bp, Artificial Sequence
  Description of Artificial Sequence: Synthetic oligonucleotide
gtcaaaaacacaaacgtcagc

SEQ ID NO: 41526 - DNA, 21 bp, Artificial Sequence
  Description of Artificial Sequence: Synthetic oligonucleotide
gtcaaaaacacatacccagaa

SEQ ID NO: 41527 - DNA, 21 bp, Artificial Sequence
  Description of Artificial Sequence: Synthetic oligonucleotide
gtcaaaaactacgaaccacaa

SEQ ID NO: 41528 - DNA, 21 bp, Artificial Sequence
  Description of Artificial Sequence: Synthetic oligonucleotide
gtcaaaccagacgcatgcttc

SEQ ID NO: 41529 - DNA, 21 bp, Artificial Sequence
  Description of Artificial Sequence: Synthetic oligonucleotide
gtcaaaccaggaatgatgcca

SEQ ID NO: 41530 - DNA, 21 bp, Artificial Sequence
  Description of Artificial Sequence: Synthetic oligonucleotide
gtcaaaccactcggaatgcca

SEQ ID NO: 41531 - DNA, 21 bp, Artificial Sequence
  Description of Artificial Sequence: Synthetic oligonucleotide
gtcaaaccaatggcaagcagc

SEQ ID NO: 41532 - DNA, 21 bp, Artificial Sequence
  Description of Artificial Sequence: Synthetic oligonucleotide
gtcaaaccaagcccaatcctc

SEQ ID NO: 41533 - DNA, 21 bp, Artificial Sequence
  Description of Artificial Sequence: Synthetic oligonucleotide
gtcaaaccaacaccagacgca

SEQ ID NO: 41534 - DNA, 21 bp, Artificial Sequence
  Description of Artificial Sequence: Synthetic oligonucleotide
gtcaaaccatacagcctccac

SEQ ID NO: 41535 - DNA, 21 bp, Artificial Sequence
  Description of Artificial Sequence: Synthetic oligonucleotide
gtcaaaccatacgtcacaatg

SEQ ID NO: 41536 - DNA, 21 bp, Artificial Sequence
  Description of Artificial Sequence: Synthetic oligonucleotide
gtcaaacaaagagcaatggtc

SEQ ID NO: 41537 - DNA, 21 bp, Artificial Sequence
  Description of Artificial Sequence: Synthetic oligonucleotide
gtcaaaagcgcagaaacaatc

SEQ ID NO: 41538 - DNA, 21 bp, Artificial Sequence
  Description of Artificial Sequence: Synthetic oligonucleotide
gtcaaaagcgacatcctcgca

SEQ ID NO: 41539 - DNA, 21 bp, Artificial Sequence
  Description of Artificial Sequence: Synthetic oligonucleotide
gtcaaaagcgaattcccaaaa

SEQ ID NO: 41540 - DNA, 21 bp, Artificial Sequence
  Description of Artificial Sequence: Synthetic oligonucleotide
gtcaaaagcgaaacaggagtc

SEQ ID NO: 41541 - DNA, 21 bp, Artificial Sequence
  Description of Artificial Sequence: Synthetic oligonucleotide
gtcaaaagcagagcagaaaca

SEQ ID NO: 41542 - DNA, 21 bp, Artificial Sequence
  Description of Artificial Sequence: Synthetic oligonucleotide
gtcaaaagcagcgacagcaca

SEQ ID NO: 41543 - DNA, 21 bp, Artificial Sequence
  Description of Artificial Sequence: Synthetic oligonucleotide
gtcaaaacaaacgcaacactc

SEQ ID NO: 41544 - DNA, 21 bp, Artificial Sequence
  Description of Artificial Sequence: Synthetic oligonucleotide
gtcaaaacaccaccactcaca

SEQ ID NO: 41545 - DNA, 21 bp, Artificial Sequence
  Description of Artificial Sequence: Synthetic oligonucleotide
gtcaaaacaccaagcctcaac

SEQ ID NO: 41546 - DNA, 21 bp, Artificial Sequence
  Description of Artificial Sequence: Synthetic oligonucleotide
gtcaaaacaccatggggacca

SEQ ID NO: 41547 - DNA, 21 bp, Artificial Sequence
  Description of Artificial Sequence: Synthetic oligonucleotide
gtcaaaacacaaagcgacctc

SEQ ID NO: 41548 - DNA, 21 bp, Artificial Sequence
  Description of Artificial Sequence: Synthetic oligonucleotide
gtcaaagtcccaggagcattc

SEQ ID NO: 41549 - DNA, 21 bp, Artificial Sequence
  Description of Artificial Sequence: Synthetic oligonucleotide
gtcctcgcacacagcgacagc

SEQ ID NO: 41550 - DNA, 21 bp, Artificial Sequence
  Description of Artificial Sequence: Synthetic oligonucleotide
gtcctcgcacacagcacatac

SEQ ID NO: 41551 - DNA, 21 bp, Artificial Sequence
  Description of Artificial Sequence: Synthetic oligonucleotide
gtcctcgcaccactcgtcagc

SEQ ID NO: 41552 - DNA, 21 bp, Artificial Sequence
  Description of Artificial Sequence: Synthetic oligonucleotide
gtcctcgcaagacaataccca

SEQ ID NO: 41553 - DNA, 21 bp, Artificial Sequence
  Description of Artificial Sequence: Synthetic oligonucleotide
gtcctcgcaagcacagtcagc

SEQ ID NO: 41554 - DNA, 21 bp, Artificial Sequence
  Description of Artificial Sequence: Synthetic oligonucleotide
gtcctcgcaacaacagtcgga

SEQ ID NO: 41555 - DNA, 21 bp, Artificial Sequence
  Description of Artificial Sequence: Synthetic oligonucleotide
gtcctcgcaacagtcacaaaa

SEQ ID NO: 41556 - DNA, 21 bp, Artificial Sequence
  Description of Artificial Sequence: Synthetic oligonucleotide
gtcctcgcagtcagaacaaac

SEQ ID NO: 41557 - DNA, 21 bp, Artificial Sequence
  Description of Artificial Sequence: Synthetic oligonucleotide
gtcctcgactgggaaggagac

SEQ ID NO: 41558 - DNA, 21 bp, Artificial Sequence
  Description of Artificial Sequence: Synthetic oligonucleotide
gtcctcgaacacctccaccca

SEQ ID NO: 41559 - DNA, 21 bp, Artificial Sequence
  Description of Artificial Sequence: Synthetic oligonucleotide
gtcctcgaaaaactcaaaaca

SEQ ID NO: 41560 - DNA, 21 bp, Artificial Sequence
  Description of Artificial Sequence: Synthetic oligonucleotide
gtcctcgaactcgaacacaga

SEQ ID NO: 41561 - DNA, 21 bp, Artificial Sequence
  Description of Artificial Sequence: Synthetic oligonucleotide
gtcctcgaaccactcagcaaa

SEQ ID NO: 41562 - DNA, 21 bp, Artificial Sequence
  Description of Artificial Sequence: Synthetic oligonucleotide
gtcctcgaaacaagaacactc

SEQ ID NO: 41563 - DNA, 21 bp, Artificial Sequence
  Description of Artificial Sequence: Synthetic oligonucleotide
gtcctcggaggactcgcaagc

SEQ ID NO: 41564 - DNA, 21 bp, Artificial Sequence
  Description of Artificial Sequence: Synthetic oligonucleotide
gtcctcggactcgcaccagca

SEQ ID NO: 41565 - DNA, 21 bp, Artificial Sequence
  Description of Artificial Sequence: Synthetic oligonucleotide
gtcctcggactcggaggacca

SEQ ID NO: 41566 - DNA, 21 bp, Artificial Sequence
  Description of Artificial Sequence: Synthetic oligonucleotide
gtcctcggaatgggagaatgg

SEQ ID NO: 41567 - DNA, 21 bp, Artificial Sequence
  Description of Artificial Sequence: Synthetic oligonucleotide
gtcctcggaagaggatacagc

SEQ ID NO: 41568 - DNA, 21 bp, Artificial Sequence
  Description of Artificial Sequence: Synthetic oligonucleotide
gtcctcggaagcctccaacac

SEQ ID NO: 41569 - DNA, 21 bp, Artificial Sequence
  Description of Artificial Sequence: Synthetic oligonucleotide
gtcctcggaagcgtcggaagc

SEQ ID NO: 41570 - DNA, 21 bp, Artificial Sequence
  Description of Artificial Sequence: Synthetic oligonucleotide
gtcctcggatacagcaaacca

SEQ ID NO: 41571 - DNA, 21 bp, Artificial Sequence
  Description of Artificial Sequence: Synthetic oligonucleotide
gtcctccacgcagcaagcgca

SEQ ID NO: 41572 - DNA, 21 bp, Artificial Sequence
  Description of Artificial Sequence: Synthetic oligonucleotide
gtcctccaccaaagaggagca

SEQ ID NO: 41573 - DNA, 21 bp, Artificial Sequence
  Description of Artificial Sequence: Synthetic oligonucleotide
gtcctcaaagcacacccagac

SEQ ID NO: 41574 - DNA, 21 bp, Artificial Sequence
  Description of Artificial Sequence: Synthetic oligonucleotide
gtcctcaaaccaggagtcaca

SEQ ID NO: 41575 - DNA, 21 bp, Artificial Sequence
  Description of Artificial Sequence: Synthetic oligonucleotide
gtcctcaaaccaagcgtccca

SEQ ID NO: 41576 - DNA, 21 bp, Artificial Sequence
  Description of Artificial Sequence: Synthetic oligonucleotide
gtcctcaaaccatacatcaac

SEQ ID NO: 41577 - DNA, 21 bp, Artificial Sequence
  Description of Artificial Sequence: Synthetic oligonucleotide
gtcctcaaaagccacagcgca

SEQ ID NO: 41578 - DNA, 21 bp, Artificial Sequence
  Description of Artificial Sequence: Synthetic oligonucleotide
gtcctcaaaagcagcgcaagc

SEQ ID NO: 41579 - DNA, 21 bp, Artificial Sequence
  Description of Artificial Sequence: Synthetic oligonucleotide
gtcctcctcccaagccaccca

SEQ ID NO: 41580 - DNA, 21 bp, Artificial Sequence
  Description of Artificial Sequence: Synthetic oligonucleotide
gtcctcctcacaaaaacatgc

SEQ ID NO: 41581 - DNA, 21 bp, Artificial Sequence
  Description of Artificial Sequence: Synthetic oligonucleotide
gtcctcatgccaagcacaatc

SEQ ID NO: 41582 - DNA, 21 bp, Artificial Sequence
  Description of Artificial Sequence: Synthetic oligonucleotide
gtcctcatgccaacagaagca

SEQ ID NO: 41583 - DNA, 21 bp, Artificial Sequence
  Description of Artificial Sequence: Synthetic oligonucleotide
gtcctcaacggaagaagcagc

SEQ ID NO: 41584 - DNA, 21 bp, Artificial Sequence
  Description of Artificial Sequence: Synthetic oligonucleotide
gtcctcaaccacccaacattc

SEQ ID NO: 41585 - DNA, 21 bp, Artificial Sequence
  Description of Artificial Sequence: Synthetic oligonucleotide
gtcctcaaccaccaaagcagc

SEQ ID NO: 41586 - DNA, 21 bp, Artificial Sequence
  Description of Artificial Sequence: Synthetic oligonucleotide
gtcctcaacctcacacaagga

SEQ ID NO: 41587 - DNA, 21 bp, Artificial Sequence
  Description of Artificial Sequence: Synthetic oligonucleotide
gtcctcaacccactcaacagc

SEQ ID NO: 41588 - DNA, 21 bp, Artificial Sequence
  Description of Artificial Sequence: Synthetic oligonucleotide
gtcctcaacacagacgtcaca

SEQ ID NO: 41589 - DNA, 21 bp, Artificial Sequence
  Description of Artificial Sequence: Synthetic oligonucleotide
gtcctcaacacaggagtcgga

SEQ ID NO: 41590 - DNA, 21 bp, Artificial Sequence
  Description of Artificial Sequence: Synthetic oligonucleotide
gtcctcccaaaaacaagcgca

SEQ ID NO: 41591 - DNA, 21 bp, Artificial Sequence
  Description of Artificial Sequence: Synthetic oligonucleotide
gtcctcccaaacagcaaaaac

SEQ ID NO: 41592 - DNA, 21 bp, Artificial Sequence
  Description of Artificial Sequence: Synthetic oligonucleotide
gtcctcccaccactcgcagca

SEQ ID NO: 41593 - DNA, 21 bp, Artificial Sequence
  Description of Artificial Sequence: Synthetic oligonucleotide
gtcctcccaccaaacaacaaa

SEQ ID NO: 41594 - DNA, 21 bp, Artificial Sequence
  Description of Artificial Sequence: Synthetic oligonucleotide
gtcctcccagtcccaagagca

SEQ ID NO: 41595 - DNA, 21 bp, Artificial Sequence
  Description of Artificial Sequence: Synthetic oligonucleotide
gtcctccaaggaagcagcgca

SEQ ID NO: 41596 - DNA, 21 bp, Artificial Sequence
  Description of Artificial Sequence: Synthetic oligonucleotide
gtcctccaaacaacaagacca

SEQ ID NO: 41597 - DNA, 21 bp, Artificial Sequence
  Description of Artificial Sequence: Synthetic oligonucleotide
gtcctcagaggacacctcgca

SEQ ID NO: 41598 - DNA, 21 bp, Artificial Sequence
  Description of Artificial Sequence: Synthetic oligonucleotide
gtcctcagactcggaacagca

SEQ ID NO: 41599 - DNA, 21 bp, Artificial Sequence
  Description of Artificial Sequence: Synthetic oligonucleotide
gtcctcagaaacggagcagaa

SEQ ID NO: 41600 - DNA, 21 bp, Artificial Sequence
  Description of Artificial Sequence: Synthetic oligonucleotide
gtcctcagacaaagcgtccca

SEQ ID NO: 41601 - DNA, 21 bp, Artificial Sequence
  Description of Artificial Sequence: Synthetic oligonucleotide
gtcctcagaagcgacgcagca

SEQ ID NO: 41602 - DNA, 21 bp, Artificial Sequence
  Description of Artificial Sequence: Synthetic oligonucleotide
gtcctcagaacaggagaattc

SEQ ID NO: 41603 - DNA, 21 bp, Artificial Sequence
  Description of Artificial Sequence: Synthetic oligonucleotide
gtcctcagaacaagcagcgga

SEQ ID NO: 41604 - DNA, 21 bp, Artificial Sequence
  Description of Artificial Sequence: Synthetic oligonucleotide
gtcctcagccacgacgtcgtc

SEQ ID NO: 41605 - DNA, 21 bp, Artificial Sequence
  Description of Artificial Sequence: Synthetic oligonucleotide
gtcctcagccacggaggagca

SEQ ID NO: 41606 - DNA, 21 bp, Artificial Sequence
  Description of Artificial Sequence: Synthetic oligonucleotide
gtcctcagcccaaacacagca

SEQ ID NO: 41607 - DNA, 21 bp, Artificial Sequence
  Description of Artificial Sequence: Synthetic oligonucleotide
gtcctcagcccaacaggaatg

SEQ ID NO: 41608 - DNA, 21 bp, Artificial Sequence
  Description of Artificial Sequence: Synthetic oligonucleotide
gtcctcagcagaggaaacaca

SEQ ID NO: 41609 - DNA, 21 bp, Artificial Sequence
  Description of Artificial Sequence: Synthetic oligonucleotide
gtcctcagcagcaacagctac

SEQ ID NO: 41610 - DNA, 21 bp, Artificial Sequence
  Description of Artificial Sequence: Synthetic oligonucleotide
gtcctcagcacaatcagcagc

SEQ ID NO: 41611 - DNA, 21 bp, Artificial Sequence
  Description of Artificial Sequence: Synthetic oligonucleotide
gtcctcagcacaatgagccca

SEQ ID NO: 41612 - DNA, 21 bp, Artificial Sequence
  Description of Artificial Sequence: Synthetic oligonucleotide
gtcctcagcgtcagcggaaga

SEQ ID NO: 41613 - DNA, 21 bp, Artificial Sequence
  Description of Artificial Sequence: Synthetic oligonucleotide
gtcctcagctaccacacagga

SEQ ID NO: 41614 - DNA, 21 bp, Artificial Sequence
  Description of Artificial Sequence: Synthetic oligonucleotide
gtcctcacagcaacaatgagc

SEQ ID NO: 41615 - DNA, 21 bp, Artificial Sequence
  Description of Artificial Sequence: Synthetic oligonucleotide
gtcctcacaggacaaagactc

SEQ ID NO: 41616 - DNA, 21 bp, Artificial Sequence
  Description of Artificial Sequence: Synthetic oligonucleotide
gtcctcacacaacaaccagtc

SEQ ID NO: 41617 - DNA, 21 bp, Artificial Sequence
  Description of Artificial Sequence: Synthetic oligonucleotide
gtcctcacaagagcaggaatc

SEQ ID NO: 41618 - DNA, 21 bp, Artificial Sequence
  Description of Artificial Sequence: Synthetic oligonucleotide
gtcctcacaagcaacacacca

SEQ ID NO: 41619 - DNA, 21 bp, Artificial Sequence
  Description of Artificial Sequence: Synthetic oligonucleotide
gtcctcgtcgcagcaagcatg

SEQ ID NO: 41620 - DNA, 21 bp, Artificial Sequence
  Description of Artificial Sequence: Synthetic oligonucleotide
gtcctcgtcagaagcggaagc

SEQ ID NO: 41621 - DNA, 21 bp, Artificial Sequence
  Description of Artificial Sequence: Synthetic oligonucleotide
gtcctcgtcgtcccaaaccac

SEQ ID NO: 41622 - DNA, 21 bp, Artificial Sequence
  Description of Artificial Sequence: Synthetic oligonucleotide
gtcctcgtcgtcagaggaaca

SEQ ID NO: 41623 - DNA, 21 bp, Artificial Sequence
  Description of Artificial Sequence: Synthetic oligonucleotide
gtcctctacagcggactcagc

SEQ ID NO: 41624 - DNA, 21 bp, Artificial Sequence
  Description of Artificial Sequence: Synthetic oligonucleotide
gtcctctacacaaacctcgaa

SEQ ID NO: 41625 - DNA, 21 bp, Artificial Sequence
  Description of Artificial Sequence: Synthetic oligonucleotide
gtcatggacggactcgaacca

SEQ ID NO: 41626 - DNA, 21 bp, Artificial Sequence
  Description of Artificial Sequence: Synthetic oligonucleotide
gtcatggacggagtcagacca

SEQ ID NO: 41627 - DNA, 21 bp, Artificial Sequence
  Description of Artificial Sequence: Synthetic oligonucleotide
gtcatgggagcaaaaggactc

SEQ ID NO: 41628 - DNA, 21 bp, Artificial Sequence
  Description of Artificial Sequence: Synthetic oligonucleotide
gtcatgggaggaaacccaagc

SEQ ID NO: 41629 - DNA, 21 bp, Artificial Sequence
  Description of Artificial Sequence: Synthetic oligonucleotide
gtcatgcacctcgcagacgac

SEQ ID NO: 41630 - DNA, 21 bp, Artificial Sequence
  Description of Artificial Sequence: Synthetic oligonucleotide
gtcatgaacctcctcaaacac

SEQ ID NO: 41631 - DNA, 21 bp, Artificial Sequence
  Description of Artificial Sequence: Synthetic oligonucleotide
gtcatgaacctcagcacaatg

SEQ ID NO: 41632 - DNA, 21 bp, Artificial Sequence
  Description of Artificial Sequence: Synthetic oligonucleotide
gtcatgaacagcccaagaagc

SEQ ID NO: 41633 - DNA, 21 bp, Artificial Sequence
  Description of Artificial Sequence: Synthetic oligonucleotide
gtcatgccattcacacacgac

SEQ ID NO: 41634 - DNA, 21 bp, Artificial Sequence
  Description of Artificial Sequence: Synthetic oligonucleotide
gtcatgccaaacacaccaagc

SEQ ID NO: 41635 - DNA, 21 bp, Artificial Sequence
  Description of Artificial Sequence: Synthetic oligonucleotide
gtcatgccacaaagactcagc

SEQ ID NO: 41636 - DNA, 21 bp, Artificial Sequence
  Description of Artificial Sequence: Synthetic oligonucleotide
gtcatgccaagcgcaagcgca

SEQ ID NO: 41637 - DNA, 21 bp, Artificial Sequence
  Description of Artificial Sequence: Synthetic oligonucleotide
gtcatgccaagcctcgtcagc

SEQ ID NO: 41638 - DNA, 21 bp, Artificial Sequence
  Description of Artificial Sequence: Synthetic oligonucleotide
gtcatgcaagcaagcaacagc

SEQ ID NO: 41639 - DNA, 21 bp, Artificial Sequence
  Description of Artificial Sequence: Synthetic oligonucleotide
gtcatgcaagaaaactgccca

SEQ ID NO: 41640 - DNA, 21 bp, Artificial Sequence
  Description of Artificial Sequence: Synthetic oligonucleotide
gtcatgcaactcggagaaagc

SEQ ID NO: 41641 - DNA, 21 bp, Artificial Sequence
  Description of Artificial Sequence: Synthetic oligonucleotide
gtcatgcaaagcatcctcgca

SEQ ID NO: 41642 - DNA, 21 bp, Artificial Sequence
  Description of Artificial Sequence: Synthetic oligonucleotide
gtcatgagactcgacaaacaa

SEQ ID NO: 41643 - DNA, 21 bp, Artificial Sequence
  Description of Artificial Sequence: Synthetic oligonucleotide
gtcatgagaccagacagaagc

SEQ ID NO: 41644 - DNA, 21 bp, Artificial Sequence
  Description of Artificial Sequence: Synthetic oligonucleotide
gtcatgagcgcagtcgacctc

SEQ ID NO: 41645 - DNA, 21 bp, Artificial Sequence
  Description of Artificial Sequence: Synthetic oligonucleotide
gtcatgagcgacagcaaagtc

SEQ ID NO: 41646 - DNA, 21 bp, Artificial Sequence
  Description of Artificial Sequence: Synthetic oligonucleotide
gtcatgagcatgccaagactc

SEQ ID NO: 41647 - DNA, 21 bp, Artificial Sequence
  Description of Artificial Sequence: Synthetic oligonucleotide
gtcatgagcccagacagcatg

SEQ ID NO: 41648 - DNA, 21 bp, Artificial Sequence
  Description of Artificial Sequence: Synthetic oligonucleotide
gtcatgagcagcagaacaaca

SEQ ID NO: 41649 - DNA, 21 bp, Artificial Sequence
  Description of Artificial Sequence: Synthetic oligonucleotide
gtcatgacagacgcactccac

SEQ ID NO: 41650 - DNA, 21 bp, Artificial Sequence
  Description of Artificial Sequence: Synthetic oligonucleotide
gtcatgacaagccacccaatg

SEQ ID NO: 41651 - DNA, 21 bp, Artificial Sequence
  Description of Artificial Sequence: Synthetic oligonucleotide
gtcatgacaagccaagcaatg

SEQ ID NO: 41652 - DNA, 21 bp, Artificial Sequence
  Description of Artificial Sequence: Synthetic oligonucleotide
gtcatgacaacaacaggacac

SEQ ID NO: 41653 - DNA, 21 bp, Artificial Sequence
  Description of Artificial Sequence: Synthetic oligonucleotide
gtcatgacagtcgcaagcctc

SEQ ID NO: 41654 - DNA, 21 bp, Artificial Sequence
  Description of Artificial Sequence: Synthetic oligonucleotide
gtcatggtcgaaagcggacca

SEQ ID NO: 41655 - DNA, 21 bp, Artificial Sequence
  Description of Artificial Sequence: Synthetic oligonucleotide
gtcaacgcaaaaagcagcaca

SEQ ID NO: 41656 - DNA, 21 bp, Artificial Sequence
  Description of Artificial Sequence: Synthetic oligonucleotide
gtcaacgcactcagcagcgca

SEQ ID NO: 41657 - DNA, 21 bp, Artificial Sequence
  Description of Artificial Sequence: Synthetic oligonucleotide
gtcaacgcagtcggagcacca

SEQ ID NO: 41658 - DNA, 21 bp, Artificial Sequence
  Description of Artificial Sequence: Synthetic oligonucleotide
gtcaacgacgtcctcccaaca

SEQ ID NO: 41659 - DNA, 21 bp, Artificial Sequence
  Description of Artificial Sequence: Synthetic oligonucleotide
gtcaacgactacgcacacagc

SEQ ID NO: 41660 - DNA, 21 bp, Artificial Sequence
  Description of Artificial Sequence: Synthetic oligonucleotide
gtcaacgaactcggaagaaca

SEQ ID NO: 41661 - DNA, 21 bp, Artificial Sequence
  Description of Artificial Sequence: Synthetic oligonucleotide
gtcaacgaactcgtcagaaca

SEQ ID NO: 41662 - DNA, 21 bp, Artificial Sequence
  Description of Artificial Sequence: Synthetic oligonucleotide
gtcaacttcaacccaatcagc

SEQ ID NO: 41663 - DNA, 21 bp, Artificial Sequence
  Description of Artificial Sequence: Synthetic oligonucleotide
gtcaacggacacgcactcaca

SEQ ID NO: 41664 - DNA, 21 bp, Artificial Sequence
  Description of Artificial Sequence: Synthetic oligonucleotide
gtcaacggactcaacgtcgtc

SEQ ID NO: 41665 - DNA, 21 bp, Artificial Sequence
  Description of Artificial Sequence: Synthetic oligonucleotide
gtcaacggaaacgaacacgga

SEQ ID NO: 41666 - DNA, 21 bp, Artificial Sequence
  Description of Artificial Sequence: Synthetic oligonucleotide
gtcaacggaagcgcattcagc

SEQ ID NO: 41667 - DNA, 21 bp, Artificial Sequence
  Description of Artificial Sequence: Synthetic oligonucleotide
gtcaaccacatgagcagccca

SEQ ID NO: 41668 - DNA, 21 bp, Artificial Sequence
  Description of Artificial Sequence: Synthetic oligonucleotide
gtcaaccacagaagcgcacca

SEQ ID NO: 41669 - DNA, 21 bp, Artificial Sequence
  Description of Artificial Sequence: Synthetic oligonucleotide
gtcaacaaagacccactcgca

SEQ ID NO: 41670 - DNA, 21 bp, Artificial Sequence
  Description of Artificial Sequence: Synthetic oligonucleotide
gtcaacaaaggagtcagcgca

SEQ ID NO: 41671 - DNA, 21 bp, Artificial Sequence
  Description of Artificial Sequence: Synthetic oligonucleotide
gtcaacaaaagcggataccca

SEQ ID NO: 41672 - DNA, 21 bp, Artificial Sequence
  Description of Artificial Sequence: Synthetic oligonucleotide
gtcaacaaaagcacagtcagc

SEQ ID NO: 41673 - DNA, 21 bp, Artificial Sequence
  Description of Artificial Sequence: Synthetic oligonucleotide
gtcaacaaaagctacagcatg

SEQ ID NO: 41674 - DNA, 21 bp, Artificial Sequence
  Description of Artificial Sequence: Synthetic oligonucleotide
gtcaacctcgcaagcagcgtc

SEQ ID NO: 41675 - DNA, 21 bp, Artificial Sequence
  Description of Artificial Sequence: Synthetic oligonucleotide
gtcaacctcggaagcaacaac

SEQ ID NO: 41676 - DNA, 21 bp, Artificial Sequence
  Description of Artificial Sequence: Synthetic oligonucleotide
gtcaacctcagactcggaagc

SEQ ID NO: 41677 - DNA, 21 bp, Artificial Sequence
  Description of Artificial Sequence: Synthetic oligonucleotide
gtcaacctcagcagcgtctgc

SEQ ID NO: 41678 - DNA, 21 bp, Artificial Sequence
  Description of Artificial Sequence: Synthetic oligonucleotide
gtcaacctcgtccacggagtc

SEQ ID NO: 41679 - DNA, 21 bp, Artificial Sequence
  Description of Artificial Sequence: Synthetic oligonucleotide
gtcaacctctacctcacagaa

SEQ ID NO: 41680 - DNA, 21 bp, Artificial Sequence
  Description of Artificial Sequence: Synthetic oligonucleotide
gtcaacaacacaagaaacgtc

SEQ ID NO: 41681 - DNA, 21 bp, Artificial Sequence
  Description of Artificial Sequence: Synthetic oligonucleotide
gtcaacccaccaaacgtcgga

SEQ ID NO: 41682 - DNA, 21 bp, Artificial Sequence
  Description of Artificial Sequence: Synthetic oligonucleotide
gtcaacccaccaagcagacca

SEQ ID NO: 41683 - DNA, 21 bp, Artificial Sequence
  Description of Artificial Sequence: Synthetic oligonucleotide
gtcaacccaccaacacacgtc

SEQ ID NO: 41684 - DNA, 21 bp, Artificial Sequence
  Description of Artificial Sequence: Synthetic oligonucleotide
gtcaacccaagagtcgtccaa

SEQ ID NO: 41685 - DNA, 21 bp, Artificial Sequence
  Description of Artificial Sequence: Synthetic oligonucleotide
gtcaacccaagcgcaagcagc

SEQ ID NO: 41686 - DNA, 21 bp, Artificial Sequence
  Description of Artificial Sequence: Synthetic oligonucleotide
gtcaacccaagcagcccaagc

SEQ ID NO: 41687 - DNA, 21 bp, Artificial Sequence
  Description of Artificial Sequence: Synthetic oligonucleotide
gtcaacagaagcgtcagccca

SEQ ID NO: 41688 - DNA, 21 bp, Artificial Sequence
  Description of Artificial Sequence: Synthetic oligonucleotide
gtcaacagaacaacactctac

SEQ ID NO: 41689 - DNA, 21 bp, Artificial Sequence
  Description of Artificial Sequence: Synthetic oligonucleotide
gtcaacagcgcaagcaaaagc

SEQ ID NO: 41690 - DNA, 21 bp, Artificial Sequence
  Description of Artificial Sequence: Synthetic oligonucleotide
gtcaacagcttcgaaagaagc

SEQ ID NO: 41691 - DNA, 21 bp, Artificial Sequence
  Description of Artificial Sequence: Synthetic oligonucleotide
gtcaacagcggagcaacaaca

SEQ ID NO: 41692 - DNA, 21 bp, Artificial Sequence
  Description of Artificial Sequence: Synthetic oligonucleotide
gtcaacagcatggaaagacca

SEQ ID NO: 41693 - DNA, 21 bp, Artificial Sequence
  Description of Artificial Sequence: Synthetic oligonucleotide
gtcaacagcagactcatcgca

SEQ ID NO: 41694 - DNA, 21 bp, Artificial Sequence
  Description of Artificial Sequence: Synthetic oligonucleotide
gtcaacagcagcctccacgga

SEQ ID NO: 41695 - DNA, 21 bp, Artificial Sequence
  Description of Artificial Sequence: Synthetic oligonucleotide
gtcaacagcagcaacagcaga

SEQ ID NO: 41696 - DNA, 21 bp, Artificial Sequence
  Description of Artificial Sequence: Synthetic oligonucleotide
gtcaacagcagcgtctgggca

SEQ ID NO: 41697 - DNA, 21 bp, Artificial Sequence
  Description of Artificial Sequence: Synthetic oligonucleotide
gtcaacagcacagcattccac

SEQ ID NO: 41698 - DNA, 21 bp, Artificial Sequence
  Description of Artificial Sequence: Synthetic oligonucleotide
gtcaacacaaaagtcggacca

SEQ ID NO: 41699 - DNA, 21 bp, Artificial Sequence
  Description of Artificial Sequence: Synthetic oligonucleotide
gtcaacacactcacaggagac

SEQ ID NO: 41700 - DNA, 21 bp, Artificial Sequence
  Description of Artificial Sequence: Synthetic oligonucleotide
gtcaacacaaacctcgcaagc

SEQ ID NO: 41701 - DNA, 21 bp, Artificial Sequence
  Description of Artificial Sequence: Synthetic oligonucleotide
gtcaacacaagcggatggcaa

SEQ ID NO: 41702 - DNA, 21 bp, Artificial Sequence
  Description of Artificial Sequence: Synthetic oligonucleotide
gtcaacacagtcccatacgga

SEQ ID NO: 41703 - DNA, 21 bp, Artificial Sequence
  Description of Artificial Sequence: Synthetic oligonucleotide
gtcaacacagtcacaagcagc

SEQ ID NO: 41704 - DNA, 21 bp, Artificial Sequence
  Description of Artificial Sequence: Synthetic oligonucleotide
gtcaacgtcggaacactctac

SEQ ID NO: 41705 - DNA, 21 bp, Artificial Sequence
  Description of Artificial Sequence: Synthetic oligonucleotide
gtcaacgtcaaaagagaagtc

SEQ ID NO: 41706 - DNA, 21 bp, Artificial Sequence
  Description of Artificial Sequence: Synthetic oligonucleotide
gtcaacgtcagagaaacaaca

SEQ ID NO: 41707 - DNA, 21 bp, Artificial Sequence
  Description of Artificial Sequence: Synthetic oligonucleotide
gtcaacgtcagccactacagc

SEQ ID NO: 41708 - DNA, 21 bp, Artificial Sequence
  Description of Artificial Sequence: Synthetic oligonucleotide
gtcaacgtcagccaaacagga

SEQ ID NO: 41709 - DNA, 21 bp, Artificial Sequence
  Description of Artificial Sequence: Synthetic oligonucleotide
gtcaactacgcaccagcagtc

SEQ ID NO: 41710 - DNA, 21 bp, Artificial Sequence
  Description of Artificial Sequence: Synthetic oligonucleotide
gtcaactacccagaaagcaca

SEQ ID NO: 41711 - DNA, 21 bp, Artificial Sequence
  Description of Artificial Sequence: Synthetic oligonucleotide
gtcccagcaatgacacaagga

SEQ ID NO: 41712 - DNA, 21 bp, Artificial Sequence
  Description of Artificial Sequence: Synthetic oligonucleotide
gtcccagcaccaggatacaac

SEQ ID NO: 41713 - DNA, 21 bp, Artificial Sequence
  Description of Artificial Sequence: Synthetic oligonucleotide
gtcccagcacaaagcagagaa

SEQ ID NO: 41714 - DNA, 21 bp, Artificial Sequence
  Description of Artificial Sequence: Synthetic oligonucleotide
gtcccagcaagaagcccagga

SEQ ID NO: 41715 - DNA, 21 bp, Artificial Sequence
  Description of Artificial Sequence: Synthetic oligonucleotide
gtcccagcaagcagcacaagc

SEQ ID NO: 41716 - DNA, 21 bp, Artificial Sequence
  Description of Artificial Sequence: Synthetic oligonucleotide
gtcccagcaacagacttcaga

SEQ ID NO: 41717 - DNA, 21 bp, Artificial Sequence
  Description of Artificial Sequence: Synthetic oligonucleotide
gtcccagcagtcacaagcaga

SEQ ID NO: 41718 - DNA, 21 bp, Artificial Sequence
  Description of Artificial Sequence: Synthetic oligonucleotide
gtcccatgcccaagccacaca

SEQ ID NO: 41719 - DNA, 21 bp, Artificial Sequence
  Description of Artificial Sequence: Synthetic oligonucleotide
gtcccagacgcaagcgacttc

SEQ ID NO: 41720 - DNA, 21 bp, Artificial Sequence
  Description of Artificial Sequence: Synthetic oligonucleotide
gtcccagacagctgggacaga

SEQ ID NO: 41721 - DNA, 21 bp, Artificial Sequence
  Description of Artificial Sequence: Synthetic oligonucleotide
gtcccagaaagagcaacaatc

SEQ ID NO: 41722 - DNA, 21 bp, Artificial Sequence
  Description of Artificial Sequence: Synthetic oligonucleotide
gtcccagaatacatcatcaca

SEQ ID NO: 41723 - DNA, 21 bp, Artificial Sequence
  Description of Artificial Sequence: Synthetic oligonucleotide
gtcccattcgcaagcatgaca

SEQ ID NO: 41724 - DNA, 21 bp, Artificial Sequence
  Description of Artificial Sequence: Synthetic oligonucleotide
gtcccattccaattcgaagga

SEQ ID NO: 41725 - DNA, 21 bp, Artificial Sequence
  Description of Artificial Sequence: Synthetic oligonucleotide
gtcccaggagcaaacagaatc

SEQ ID NO: 41726 - DNA, 21 bp, Artificial Sequence
  Description of Artificial Sequence: Synthetic oligonucleotide
gtcccaggagacctcagagtc

SEQ ID NO: 41727 - DNA, 21 bp, Artificial Sequence
  Description of Artificial Sequence: Synthetic oligonucleotide
gtcccaggaaaaccaggagac

SEQ ID NO: 41728 - DNA, 21 bp, Artificial Sequence
  Description of Artificial Sequence: Synthetic oligonucleotide
gtcccaggaatgacaacactc

SEQ ID NO: 41729 - DNA, 21 bp, Artificial Sequence
  Description of Artificial Sequence: Synthetic oligonucleotide
gtcccaggaaacccagcaaca

SEQ ID NO: 41730 - DNA, 21 bp, Artificial Sequence
  Description of Artificial Sequence: Synthetic oligonucleotide
gtcccaggaccagtcgtcgca

SEQ ID NO: 41731 - DNA, 21 bp, Artificial Sequence
  Description of Artificial Sequence: Synthetic oligonucleotide
gtcccaggaagaacaacacca

SEQ ID NO: 41732 - DNA, 21 bp, Artificial Sequence
  Description of Artificial Sequence: Synthetic oligonucleotide
gtcccaggaagcagaagcaca

SEQ ID NO: 41733 - DNA, 21 bp, Artificial Sequence
  Description of Artificial Sequence: Synthetic oligonucleotide
gtcccaggaagcagcagactc

SEQ ID NO: 41734 - DNA, 21 bp, Artificial Sequence
  Description of Artificial Sequence: Synthetic oligonucleotide
gtcccaggaagcagcagccac

SEQ ID NO: 41735 - DNA, 21 bp, Artificial Sequence
  Description of Artificial Sequence: Synthetic oligonucleotide
gtcccacacgaaaaaacacca

SEQ ID NO: 41736 - DNA, 21 bp, Artificial Sequence
  Description of Artificial Sequence: Synthetic oligonucleotide
gtcccacacatcgtcagcaca

SEQ ID NO: 41737 - DNA, 21 bp, Artificial Sequence
  Description of Artificial Sequence: Synthetic oligonucleotide
gtcccacacctcacaagcaca

SEQ ID NO: 41738 - DNA, 21 bp, Artificial Sequence
  Description of Artificial Sequence: Synthetic oligonucleotide
gtcccacacctcacagtcgtc

SEQ ID NO: 41739 - DNA, 21 bp, Artificial Sequence
  Description of Artificial Sequence: Synthetic oligonucleotide
gtcccacactacagcagcagc

SEQ ID NO: 41740 - DNA, 21 bp, Artificial Sequence
  Description of Artificial Sequence: Synthetic oligonucleotide
gtcccaatcatcagcgaccaa

SEQ ID NO: 41741 - DNA, 21 bp, Artificial Sequence
  Description of Artificial Sequence: Synthetic oligonucleotide
gtcccaaaattcccactcgaa

SEQ ID NO: 41742 - DNA, 21 bp, Artificial Sequence
  Description of Artificial Sequence: Synthetic oligonucleotide
gtcccaaaactcagctaccca

SEQ ID NO: 41743 - DNA, 21 bp, Artificial Sequence
  Description of Artificial Sequence: Synthetic oligonucleotide
gtcccaaaaaacgaaatggga

SEQ ID NO: 41744 - DNA, 21 bp, Artificial Sequence
  Description of Artificial Sequence: Synthetic oligonucleotide
gtcccaaaacaaagcatgcaa

SEQ ID NO: 41745 - DNA, 21 bp, Artificial Sequence
  Description of Artificial Sequence: Synthetic oligonucleotide
gtcccaaaacaaagcgtcaac

SEQ ID NO: 41746 - DNA, 21 bp, Artificial Sequence
  Description of Artificial Sequence: Synthetic oligonucleotide
gtcccaaaacaagtcagcttc

SEQ ID NO: 41747 - DNA, 21 bp, Artificial Sequence
  Description of Artificial Sequence: Synthetic oligonucleotide
gtcccactcgaccacgcagac

SEQ ID NO: 41748 - DNA, 21 bp, Artificial Sequence
  Description of Artificial Sequence: Synthetic oligonucleotide
gtcccactcgacagaatccac

SEQ ID NO: 41749 - DNA, 21 bp, Artificial Sequence
  Description of Artificial Sequence: Synthetic oligonucleotide
gtcccactcgacagcgaaagc

SEQ ID NO: 41750 - DNA, 21 bp, Artificial Sequence
  Description of Artificial Sequence: Synthetic oligonucleotide
gtcccactcggaacagacgtc

SEQ ID NO: 41751 - DNA, 21 bp, Artificial Sequence
  Description of Artificial Sequence: Synthetic oligonucleotide
gtcccactccacacaagcctc

SEQ ID NO: 41752 - DNA, 21 bp, Artificial Sequence
  Description of Artificial Sequence: Synthetic oligonucleotide
gtcccactcatcagcatggac

SEQ ID NO: 41753 - DNA, 21 bp, Artificial Sequence
  Description of Artificial Sequence: Synthetic oligonucleotide
gtcccactcaacaaagcagca

SEQ ID NO: 41754 - DNA, 21 bp, Artificial Sequence
  Description of Artificial Sequence: Synthetic oligonucleotide
gtcccactccaagaaacattc

SEQ ID NO: 41755 - DNA, 21 bp, Artificial Sequence
  Description of Artificial Sequence: Synthetic oligonucleotide
gtcccactcagcggaggattc

SEQ ID NO: 41756 - DNA, 21 bp, Artificial Sequence
  Description of Artificial Sequence: Synthetic oligonucleotide
gtcccactcagcaacatgagc

SEQ ID NO: 41757 - DNA, 21 bp, Artificial Sequence
  Description of Artificial Sequence: Synthetic oligonucleotide
gtcccactcagccaactcaac

SEQ ID NO: 41758 - DNA, 21 bp, Artificial Sequence
  Description of Artificial Sequence: Synthetic oligonucleotide
gtcccactcagcgtcacagtc

SEQ ID NO: 41759 - DNA, 21 bp, Artificial Sequence
  Description of Artificial Sequence: Synthetic oligonucleotide
gtcccactctacagcggaagc

SEQ ID NO: 41760 - DNA, 21 bp, Artificial Sequence
  Description of Artificial Sequence: Synthetic oligonucleotide
gtcccaatgcaaacagtcctc

SEQ ID NO: 41761 - DNA, 21 bp, Artificial Sequence
  Description of Artificial Sequence: Synthetic oligonucleotide
gtcccaatgagcggagcacca

SEQ ID NO: 41762 - DNA, 21 bp, Artificial Sequence
  Description of Artificial Sequence: Synthetic oligonucleotide
gtcccaatgagcagaccaagc

SEQ ID NO: 41763 - DNA, 21 bp, Artificial Sequence
  Description of Artificial Sequence: Synthetic oligonucleotide
gtcccaaacgacagactccaa

SEQ ID NO: 41764 - DNA, 21 bp, Artificial Sequence
  Description of Artificial Sequence: Synthetic oligonucleotide
gtcccaaaccacagcacagga

SEQ ID NO: 41765 - DNA, 21 bp, Artificial Sequence
  Description of Artificial Sequence: Synthetic oligonucleotide
gtcccaaacctcgaagacgac

SEQ ID NO: 41766 - DNA, 21 bp, Artificial Sequence
  Description of Artificial Sequence: Synthetic oligonucleotide
gtcccaccagcagcaagaagc

SEQ ID NO: 41767 - DNA, 21 bp, Artificial Sequence
  Description of Artificial Sequence: Synthetic oligonucleotide
gtcccaccagcaatccacgca

SEQ ID NO: 41768 - DNA, 21 bp, Artificial Sequence
  Description of Artificial Sequence: Synthetic oligonucleotide
gtcccaccaatcagcccaagc

SEQ ID NO: 41769 - DNA, 21 bp, Artificial Sequence
  Description of Artificial Sequence: Synthetic oligonucleotide
gtcccaccactcagacaagaa

SEQ ID NO: 41770 - DNA, 21 bp, Artificial Sequence
  Description of Artificial Sequence: Synthetic oligonucleotide
gtcccaccactcacaagcagc

SEQ ID NO: 41771 - DNA, 21 bp, Artificial Sequence
  Description of Artificial Sequence: Synthetic oligonucleotide
gtcccaccaagacacatcaac

SEQ ID NO: 41772 - DNA, 21 bp, Artificial Sequence
  Description of Artificial Sequence: Synthetic oligonucleotide
gtcccaccaagacaaacacac

SEQ ID NO: 41773 - DNA, 21 bp, Artificial Sequence
  Description of Artificial Sequence: Synthetic oligonucleotide
gtcccaccaagcagacaaagc

SEQ ID NO: 41774 - DNA, 21 bp, Artificial Sequence
  Description of Artificial Sequence: Synthetic oligonucleotide
gtcccaccaagcgtcagcaga

SEQ ID NO: 41775 - DNA, 21 bp, Artificial Sequence
  Description of Artificial Sequence: Synthetic oligonucleotide
gtcccaccagtccaaacacca

SEQ ID NO: 41776 - DNA, 21 bp, Artificial Sequence
  Description of Artificial Sequence: Synthetic oligonucleotide
gtcccaccatacagcgtccca

SEQ ID NO: 41777 - DNA, 21 bp, Artificial Sequence
  Description of Artificial Sequence: Synthetic oligonucleotide
gtcccacaaaaagtcacagtc

SEQ ID NO: 41778 - DNA, 21 bp, Artificial Sequence
  Description of Artificial Sequence: Synthetic oligonucleotide
gtcccaagagactacagatac

SEQ ID NO: 41779 - DNA, 21 bp, Artificial Sequence
  Description of Artificial Sequence: Synthetic oligonucleotide
gtcccaagagaaagagtcaac

SEQ ID NO: 41780 - DNA, 21 bp, Artificial Sequence
  Description of Artificial Sequence: Synthetic oligonucleotide
gtcccaagaggagacgcagca

SEQ ID NO: 41781 - DNA, 21 bp, Artificial Sequence
  Description of Artificial Sequence: Synthetic oligonucleotide
gtcccaagaaacgcaccagac

SEQ ID NO: 41782 - DNA, 21 bp, Artificial Sequence
  Description of Artificial Sequence: Synthetic oligonucleotide
gtcccaagaaacgtcacaatg

SEQ ID NO: 41783 - DNA, 21 bp, Artificial Sequence
  Description of Artificial Sequence: Synthetic oligonucleotide
gtcccaagaagcgacacactc

SEQ ID NO: 41784 - DNA, 21 bp, Artificial Sequence
  Description of Artificial Sequence: Synthetic oligonucleotide
gtcccaagaagcaacgtcagc

SEQ ID NO: 41785 - DNA, 21 bp, Artificial Sequence
  Description of Artificial Sequence: Synthetic oligonucleotide
gtcccaagaagccaactcaca

SEQ ID NO: 41786 - DNA, 21 bp, Artificial Sequence
  Description of Artificial Sequence: Synthetic oligonucleotide
gtcccaagaagcacaaacctc

SEQ ID NO: 41787 - DNA, 21 bp, Artificial Sequence
  Description of Artificial Sequence: Synthetic oligonucleotide
gtcccaagaacaggaagcaac

SEQ ID NO: 41788 - DNA, 21 bp, Artificial Sequence
  Description of Artificial Sequence: Synthetic oligonucleotide
gtcccaagaacactcacacca

SEQ ID NO: 41789 - DNA, 21 bp, Artificial Sequence
  Description of Artificial Sequence: Synthetic oligonucleotide
gtcccaagcgcaacaaaaatc

SEQ ID NO: 41790 - DNA, 21 bp, Artificial Sequence
  Description of Artificial Sequence: Synthetic oligonucleotide
gtcccaagccacatcggagca

SEQ ID NO: 41791 - DNA, 21 bp, Artificial Sequence
  Description of Artificial Sequence: Synthetic oligonucleotide
gtcccaagcaaaccaagctac

SEQ ID NO: 41792 - DNA, 21 bp, Artificial Sequence
  Description of Artificial Sequence: Synthetic oligonucleotide
gtcccaagcaaaacaccattc

SEQ ID NO: 41793 - DNA, 21 bp, Artificial Sequence
  Description of Artificial Sequence: Synthetic oligonucleotide
gtcccaagcccaagcagcagc

SEQ ID NO: 41794 - DNA, 21 bp, Artificial Sequence
  Description of Artificial Sequence: Synthetic oligonucleotide
gtcccaagcagaagccaaaac

SEQ ID NO: 41795 - DNA, 21 bp, Artificial Sequence
  Description of Artificial Sequence: Synthetic oligonucleotide
gtcccaagcagcatcagcagc

SEQ ID NO: 41796 - DNA, 21 bp, Artificial Sequence
  Description of Artificial Sequence: Synthetic oligonucleotide
gtcccaagcgtcccaggagca

SEQ ID NO: 41797 - DNA, 21 bp, Artificial Sequence
  Description of Artificial Sequence: Synthetic oligonucleotide
gtcccaagcgtcgtcagaagc

SEQ ID NO: 41798 - DNA, 21 bp, Artificial Sequence
  Description of Artificial Sequence: Synthetic oligonucleotide
gtcccaacagcactcatgagc

SEQ ID NO: 41799 - DNA, 21 bp, Artificial Sequence
  Description of Artificial Sequence: Synthetic oligonucleotide
gtcccaacagactacctcagc

SEQ ID NO: 41800 - DNA, 21 bp, Artificial Sequence
  Description of Artificial Sequence: Synthetic oligonucleotide
gtcccaacacactacgaccca

SEQ ID NO: 41801 - DNA, 21 bp, Artificial Sequence
  Description of Artificial Sequence: Synthetic oligonucleotide
gtcccaacaagaggagaattc

SEQ ID NO: 41802 - DNA, 21 bp, Artificial Sequence
  Description of Artificial Sequence: Synthetic oligonucleotide
gtcccaacaagcgcagtcaaa

SEQ ID NO: 41803 - DNA, 21 bp, Artificial Sequence
  Description of Artificial Sequence: Synthetic oligonucleotide
gtcccaacaacaagcgacttc

SEQ ID NO: 41804 - DNA, 21 bp, Artificial Sequence
  Description of Artificial Sequence: Synthetic oligonucleotide
gtcccaacagtcagcaacatc

SEQ ID NO: 41805 - DNA, 21 bp, Artificial Sequence
  Description of Artificial Sequence: Synthetic oligonucleotide
gtcccagtcgacatcctcagc

SEQ ID NO: 41806 - DNA, 21 bp, Artificial Sequence
  Description of Artificial Sequence: Synthetic oligonucleotide
gtcccagtcaaaacaagccca

SEQ ID NO: 41807 - DNA, 21 bp, Artificial Sequence
  Description of Artificial Sequence: Synthetic oligonucleotide
gtcccagtcaaaacaacatac

SEQ ID NO: 41808 - DNA, 21 bp, Artificial Sequence
  Description of Artificial Sequence: Synthetic oligonucleotide
gtcccagtcaacccaagagca

SEQ ID NO: 41809 - DNA, 21 bp, Artificial Sequence
  Description of Artificial Sequence: Synthetic oligonucleotide
gtcccagtcagcagagcattc

SEQ ID NO: 41810 - DNA, 21 bp, Artificial Sequence
  Description of Artificial Sequence: Synthetic oligonucleotide
gtcccatgggacagcccagtc

SEQ ID NO: 41811 - DNA, 21 bp, Artificial Sequence
  Description of Artificial Sequence: Synthetic oligonucleotide
gtcccatacggacaagtccac

SEQ ID NO: 41812 - DNA, 21 bp, Artificial Sequence
  Description of Artificial Sequence: Synthetic oligonucleotide
gtcccatacagcagcctccca

SEQ ID NO: 41813 - DNA, 21 bp, Artificial Sequence
  Description of Artificial Sequence: Synthetic oligonucleotide
gtcccatacacaggaatgaca

SEQ ID NO: 41814 - DNA, 21 bp, Artificial Sequence
  Description of Artificial Sequence: Synthetic oligonucleotide
gtcccatacacaagcacagac

SEQ ID NO: 41815 - DNA, 21 bp, Artificial Sequence
  Description of Artificial Sequence: Synthetic oligonucleotide
gtccaagcaggactcagaagc

SEQ ID NO: 41816 - DNA, 21 bp, Artificial Sequence
  Description of Artificial Sequence: Synthetic oligonucleotide
gtccaagcaagcagcatgaaa

SEQ ID NO: 41817 - DNA, 21 bp, Artificial Sequence
  Description of Artificial Sequence: Synthetic oligonucleotide
gtccaagacacagacagcaca

SEQ ID NO: 41818 - DNA, 21 bp, Artificial Sequence
  Description of Artificial Sequence: Synthetic oligonucleotide
gtccaagaaccagtcgtcatg

SEQ ID NO: 41819 - DNA, 21 bp, Artificial Sequence
  Description of Artificial Sequence: Synthetic oligonucleotide
gtccaaggaggaagcaacaca

SEQ ID NO: 41820 - DNA, 21 bp, Artificial Sequence
  Description of Artificial Sequence: Synthetic oligonucleotide
gtccaaggaagactcgcagga

SEQ ID NO: 41821 - DNA, 21 bp, Artificial Sequence
  Description of Artificial Sequence: Synthetic oligonucleotide
gtccaaggaagaagcggaatg

SEQ ID NO: 41822 - DNA, 21 bp, Artificial Sequence
  Description of Artificial Sequence: Synthetic oligonucleotide
gtccaaggaagcaaaccagaa

SEQ ID NO: 41823 - DNA, 21 bp, Artificial Sequence
  Description of Artificial Sequence: Synthetic oligonucleotide
gtccaaggaacactcccaagc

SEQ ID NO: 41824 - DNA, 21 bp, Artificial Sequence
  Description of Artificial Sequence: Synthetic oligonucleotide
gtccaacacctcagagcaaca

SEQ ID NO: 41825 - DNA, 21 bp, Artificial Sequence
  Description of Artificial Sequence: Synthetic oligonucleotide
gtccaacacccaacaagagca

SEQ ID NO: 41826 - DNA, 21 bp, Artificial Sequence
  Description of Artificial Sequence: Synthetic oligonucleotide
gtccaacacagaatggaagtc

SEQ ID NO: 41827 - DNA, 21 bp, Artificial Sequence
  Description of Artificial Sequence: Synthetic oligonucleotide
gtccaacacgtcgcagaactc

SEQ ID NO: 41828 - DNA, 21 bp, Artificial Sequence
  Description of Artificial Sequence: Synthetic oligonucleotide
gtccaactcgcaagcaacagc

SEQ ID NO: 41829 - DNA, 21 bp, Artificial Sequence
  Description of Artificial Sequence: Synthetic oligonucleotide
gtccaactcggaggacacgtc

SEQ ID NO: 41830 - DNA, 21 bp, Artificial Sequence
  Description of Artificial Sequence: Synthetic oligonucleotide
gtccaaatggaaagacacagc

SEQ ID NO: 41831 - DNA, 21 bp, Artificial Sequence
  Description of Artificial Sequence: Synthetic oligonucleotide
gtccaaatgatgagagacgca

SEQ ID NO: 41832 - DNA, 21 bp, Artificial Sequence
  Description of Artificial Sequence: Synthetic oligonucleotide
gtccaaaacgtcatcggacca

SEQ ID NO: 41833 - DNA, 21 bp, Artificial Sequence
  Description of Artificial Sequence: Synthetic oligonucleotide
gtccaaccagaaatcctcgca

SEQ ID NO: 41834 - DNA, 21 bp, Artificial Sequence
  Description of Artificial Sequence: Synthetic oligonucleotide
gtccaaccaggaccactcgtc

SEQ ID NO: 41835 - DNA, 21 bp, Artificial Sequence
  Description of Artificial Sequence: Synthetic oligonucleotide
gtccaaccaatcaaccaaagc

SEQ ID NO: 41836 - DNA, 21 bp, Artificial Sequence
  Description of Artificial Sequence: Synthetic oligonucleotide
gtccaaccactcccagcacac

SEQ ID NO: 41837 - DNA, 21 bp, Artificial Sequence
  Description of Artificial Sequence: Synthetic oligonucleotide
gtccaaccaatgatcagcaac

SEQ ID NO: 41838 - DNA, 21 bp, Artificial Sequence
  Description of Artificial Sequence: Synthetic oligonucleotide
gtccaaccaagagaatacgtc

SEQ ID NO: 41839 - DNA, 21 bp, Artificial Sequence
  Description of Artificial Sequence: Synthetic oligonucleotide
gtccaaccagtccaaagcgac

SEQ ID NO: 41840 - DNA, 21 bp, Artificial Sequence
  Description of Artificial Sequence: Synthetic oligonucleotide
gtccaacaaaaaggactcgca

SEQ ID NO: 41841 - DNA, 21 bp, Artificial Sequence
  Description of Artificial Sequence: Synthetic oligonucleotide
gtccaaagaatgatgggacca

SEQ ID NO: 41842 - DNA, 21 bp, Artificial Sequence
  Description of Artificial Sequence: Synthetic oligonucleotide
gtccaaagcgacagcacaagc

SEQ ID NO: 41843 - DNA, 21 bp, Artificial Sequence
  Description of Artificial Sequence: Synthetic oligonucleotide
gtccaaagcatcccaagcgca

SEQ ID NO: 41844 - DNA, 21 bp, Artificial Sequence
  Description of Artificial Sequence: Synthetic oligonucleotide
gtccaaagcctccacacagga

SEQ ID NO: 41845 - DNA, 21 bp, Artificial Sequence
  Description of Artificial Sequence: Synthetic oligonucleotide
gtccaaagcccaacatgggtc

SEQ ID NO: 41846 - DNA, 21 bp, Artificial Sequence
  Description of Artificial Sequence: Synthetic oligonucleotide
gtccaaagcagaccagacagc

SEQ ID NO: 41847 - DNA, 21 bp, Artificial Sequence
  Description of Artificial Sequence: Synthetic oligonucleotide
gtccaaagcagcgtcacactc

SEQ ID NO: 41848 - DNA, 21 bp, Artificial Sequence
  Description of Artificial Sequence: Synthetic oligonucleotide
gtccaaagcacactcctcgaa

SEQ ID NO: 41849 - DNA, 21 bp, Artificial Sequence
  Description of Artificial Sequence: Synthetic oligonucleotide
gtccaaagcgtcatgccacac

SEQ ID NO: 41850 - DNA, 21 bp, Artificial Sequence
  Description of Artificial Sequence: Synthetic oligonucleotide
gtccaaagcgtcagaatcagc

SEQ ID NO: 41851 - DNA, 21 bp, Artificial Sequence
  Description of Artificial Sequence: Synthetic oligonucleotide
gtccaaacagcaccagcagaa

SEQ ID NO: 41852 - DNA, 21 bp, Artificial Sequence
  Description of Artificial Sequence: Synthetic oligonucleotide
gtccaaacacacagcgcagca

SEQ ID NO: 41853 - DNA, 21 bp, Artificial Sequence
  Description of Artificial Sequence: Synthetic oligonucleotide
gtccaaacacaaccatacaga

SEQ ID NO: 41854 - DNA, 21 bp, Artificial Sequence
  Description of Artificial Sequence: Synthetic oligonucleotide
gtccaaacaagcggatacctc

SEQ ID NO: 41855 - DNA, 21 bp, Artificial Sequence
  Description of Artificial Sequence: Synthetic oligonucleotide
gtccaatacatgagcaaagca

SEQ ID NO: 41856 - DNA, 21 bp, Artificial Sequence
  Description of Artificial Sequence: Synthetic oligonucleotide
gtccaatacccaacagaaagc

SEQ ID NO: 41857 - DNA, 21 bp, Artificial Sequence
  Description of Artificial Sequence: Synthetic oligonucleotide
gtccaatacagcggaacacca

SEQ ID NO: 41858 - DNA, 21 bp, Artificial Sequence
  Description of Artificial Sequence: Synthetic oligonucleotide
gtcagagcagacgcagcagga

SEQ ID NO: 41859 - DNA, 21 bp, Artificial Sequence
  Description of Artificial Sequence: Synthetic oligonucleotide
gtcagagcactcccactcagc

SEQ ID NO: 41860 - DNA, 21 bp, Artificial Sequence
  Description of Artificial Sequence: Synthetic oligonucleotide
gtcagagcaaacccaagcaca

SEQ ID NO: 41861 - DNA, 21 bp, Artificial Sequence
  Description of Artificial Sequence: Synthetic oligonucleotide
gtcagagcaccaccaaacgca

SEQ ID NO: 41862 - DNA, 21 bp, Artificial Sequence
  Description of Artificial Sequence: Synthetic oligonucleotide
gtcagagcaccaccaagcctc

SEQ ID NO: 41863 - DNA, 21 bp, Artificial Sequence
  Description of Artificial Sequence: Synthetic oligonucleotide
gtcagagcaccaagagaagtc

SEQ ID NO: 41864 - DNA, 21 bp, Artificial Sequence
  Description of Artificial Sequence: Synthetic oligonucleotide
gtcagagcaagcaacacactc

SEQ ID NO: 41865 - DNA, 21 bp, Artificial Sequence
  Description of Artificial Sequence: Synthetic oligonucleotide
gtcagagcaacacaaacagaa

SEQ ID NO: 41866 - DNA, 21 bp, Artificial Sequence
  Description of Artificial Sequence: Synthetic oligonucleotide
gtcagagcagtccacccagtc

SEQ ID NO: 41867 - DNA, 21 bp, Artificial Sequence
  Description of Artificial Sequence: Synthetic oligonucleotide
gtcagagcagtccaaatcaac

SEQ ID NO: 41868 - DNA, 21 bp, Artificial Sequence
  Description of Artificial Sequence: Synthetic oligonucleotide
gtcagagacgcagcaagctgc

SEQ ID NO: 41869 - DNA, 21 bp, Artificial Sequence
  Description of Artificial Sequence: Synthetic oligonucleotide
gtcagagacgacgtcggatgg

SEQ ID NO: 41870 - DNA, 21 bp, Artificial Sequence
  Description of Artificial Sequence: Synthetic oligonucleotide
gtcagagacccagtcacaagc

SEQ ID NO: 41871 - DNA, 21 bp, Artificial Sequence
  Description of Artificial Sequence: Synthetic oligonucleotide
gtcagagacagcatgcacagc

SEQ ID NO: 41872 - DNA, 21 bp, Artificial Sequence
  Description of Artificial Sequence: Synthetic oligonucleotide
gtcagagacacaatgggacaa

SEQ ID NO: 41873 - DNA, 21 bp, Artificial Sequence
  Description of Artificial Sequence: Synthetic oligonucleotide
gtcagagactggcaaacacaa

SEQ ID NO: 41874 - DNA, 21 bp, Artificial Sequence
  Description of Artificial Sequence: Synthetic oligonucleotide
gtcagagaagcaacaagcctc

SEQ ID NO: 41875 - DNA, 21 bp, Artificial Sequence
  Description of Artificial Sequence: Synthetic oligonucleotide
gtcagagaagtcctcggaagc

SEQ ID NO: 41876 - DNA, 21 bp, Artificial Sequence
  Description of Artificial Sequence: Synthetic oligonucleotide
gtcagattcaacgaacaagca

SEQ ID NO: 41877 - DNA, 21 bp, Artificial Sequence
  Description of Artificial Sequence: Synthetic oligonucleotide
gtcagattcaacggacaaaca

SEQ ID NO: 41878 - DNA, 21 bp, Artificial Sequence
  Description of Artificial Sequence: Synthetic oligonucleotide
gtcagaggagcactcacacca

SEQ ID NO: 41879 - DNA, 21 bp, Artificial Sequence
  Description of Artificial Sequence: Synthetic oligonucleotide
gtcagaggagcagtcgcagca

SEQ ID NO: 41880 - DNA, 21 bp, Artificial Sequence
  Description of Artificial Sequence: Synthetic oligonucleotide
gtcagaggaatcgtcgcacca

SEQ ID NO: 41881 - DNA, 21 bp, Artificial Sequence
  Description of Artificial Sequence: Synthetic oligonucleotide
gtcagaggaccagaaatgaca

SEQ ID NO: 41882 - DNA, 21 bp, Artificial Sequence
  Description of Artificial Sequence: Synthetic oligonucleotide
gtcagaggaccaggagaagac

SEQ ID NO: 41883 - DNA, 21 bp, Artificial Sequence
  Description of Artificial Sequence: Synthetic oligonucleotide
gtcagaggaccacacgacaca

SEQ ID NO: 41884 - DNA, 21 bp, Artificial Sequence
  Description of Artificial Sequence: Synthetic oligonucleotide
gtcagaggaagcctcagcatg

SEQ ID NO: 41885 - DNA, 21 bp, Artificial Sequence
  Description of Artificial Sequence: Synthetic oligonucleotide
gtcagaggaagcctcacaagc

SEQ ID NO: 41886 - DNA, 21 bp, Artificial Sequence
  Description of Artificial Sequence: Synthetic oligonucleotide
gtcagaggaagccaatacgca

SEQ ID NO: 41887 - DNA, 21 bp, Artificial Sequence
  Description of Artificial Sequence: Synthetic oligonucleotide
gtcagaggaagcacacaagca

SEQ ID NO: 41888 - DNA, 21 bp, Artificial Sequence
  Description of Artificial Sequence: Synthetic oligonucleotide
gtcagaggagtccaactcgac

SEQ ID NO: 41889 - DNA, 21 bp, Artificial Sequence
  Description of Artificial Sequence: Synthetic oligonucleotide
gtcagaggagtcagcgacagc

SEQ ID NO: 41890 - DNA, 21 bp, Artificial Sequence
  Description of Artificial Sequence: Synthetic oligonucleotide
gtcagacacatcaaactcgaa

SEQ ID NO: 41891 - DNA, 21 bp, Artificial Sequence
  Description of Artificial Sequence: Synthetic oligonucleotide
gtcagacacccaggaccagaa

SEQ ID NO: 41892 - DNA, 21 bp, Artificial Sequence
  Description of Artificial Sequence: Synthetic oligonucleotide
gtcagaaaagactaccacctc

SEQ ID NO: 41893 - DNA, 21 bp, Artificial Sequence
  Description of Artificial Sequence: Synthetic oligonucleotide
gtcagactcgacgcaagcatc

SEQ ID NO: 41894 - DNA, 21 bp, Artificial Sequence
  Description of Artificial Sequence: Synthetic oligonucleotide
gtcagactcgacatggcagca

SEQ ID NO: 41895 - DNA, 21 bp, Artificial Sequence
  Description of Artificial Sequence: Synthetic oligonucleotide
gtcagactcgacagagaagga

SEQ ID NO: 41896 - DNA, 21 bp, Artificial Sequence
  Description of Artificial Sequence: Synthetic oligonucleotide
gtcagactcccagacacaagc

SEQ ID NO: 41897 - DNA, 21 bp, Artificial Sequence
  Description of Artificial Sequence: Synthetic oligonucleotide
gtcagactccaaggaggactc

SEQ ID NO: 41898 - DNA, 21 bp, Artificial Sequence
  Description of Artificial Sequence: Synthetic oligonucleotide
gtcagactcagcgaagtccca

SEQ ID NO: 41899 - DNA, 21 bp, Artificial Sequence
  Description of Artificial Sequence: Synthetic oligonucleotide
gtcagaatgctcccaggagac

SEQ ID NO: 41900 - DNA, 21 bp, Artificial Sequence
  Description of Artificial Sequence: Synthetic oligonucleotide
gtcagaaacgcaccaggagca

SEQ ID NO: 41901 - DNA, 21 bp, Artificial Sequence
  Description of Artificial Sequence: Synthetic oligonucleotide
gtcagaaacgcaagcgacctc

SEQ ID NO: 41902 - DNA, 21 bp, Artificial Sequence
  Description of Artificial Sequence: Synthetic oligonucleotide
gtcagaaacatcccaagcatg

SEQ ID NO: 41903 - DNA, 21 bp, Artificial Sequence
  Description of Artificial Sequence: Synthetic oligonucleotide
gtcagaaacagcgcaatgaac

SEQ ID NO: 41904 - DNA, 21 bp, Artificial Sequence
  Description of Artificial Sequence: Synthetic oligonucleotide
gtcagaccagcagaccaattc

SEQ ID NO: 41905 - DNA, 21 bp, Artificial Sequence
  Description of Artificial Sequence: Synthetic oligonucleotide
gtcagaccagaaagagaaaac

SEQ ID NO: 41906 - DNA, 21 bp, Artificial Sequence
  Description of Artificial Sequence: Synthetic oligonucleotide
gtcagaccaggaaaactcatc

SEQ ID NO: 41907 - DNA, 21 bp, Artificial Sequence
  Description of Artificial Sequence: Synthetic oligonucleotide
gtcagaccacacatgacagtc

SEQ ID NO: 41908 - DNA, 21 bp, Artificial Sequence
  Description of Artificial Sequence: Synthetic oligonucleotide
gtcagaccaatcccaccaaac

SEQ ID NO: 41909 - DNA, 21 bp, Artificial Sequence
  Description of Artificial Sequence: Synthetic oligonucleotide
gtcagaccactcagcatcgga

SEQ ID NO: 41910 - DNA, 21 bp, Artificial Sequence
  Description of Artificial Sequence: Synthetic oligonucleotide
gtcagaccacaaacagcatac

SEQ ID NO: 41911 - DNA, 21 bp, Artificial Sequence
  Description of Artificial Sequence: Synthetic oligonucleotide
gtcagaccaagagacggaatg

SEQ ID NO: 41912 - DNA, 21 bp, Artificial Sequence
  Description of Artificial Sequence: Synthetic oligonucleotide
gtcagaccaagcatcctcgca

SEQ ID NO: 41913 - DNA, 21 bp, Artificial Sequence
  Description of Artificial Sequence: Synthetic oligonucleotide
gtcagaccaagcagcctcgaa

SEQ ID NO: 41914 - DNA, 21 bp, Artificial Sequence
  Description of Artificial Sequence: Synthetic oligonucleotide
gtcagaccaacaaacagcgga

SEQ ID NO: 41915 - DNA, 21 bp, Artificial Sequence
  Description of Artificial Sequence: Synthetic oligonucleotide
gtcagaccaacacaaaacagc

SEQ ID NO: 41916 - DNA, 21 bp, Artificial Sequence
  Description of Artificial Sequence: Synthetic oligonucleotide
gtcagaccagtcaaagaagtc

SEQ ID NO: 41917 - DNA, 21 bp, Artificial Sequence
  Description of Artificial Sequence: Synthetic oligonucleotide
gtcagaccagtcaacggagtc

SEQ ID NO: 41918 - DNA, 21 bp, Artificial Sequence
  Description of Artificial Sequence: Synthetic oligonucleotide
gtcagacaagaaatcatcagc

SEQ ID NO: 41919 - DNA, 21 bp, Artificial Sequence
  Description of Artificial Sequence: Synthetic oligonucleotide
gtcagacaaatgacaccagga

SEQ ID NO: 41920 - DNA, 21 bp, Artificial Sequence
  Description of Artificial Sequence: Synthetic oligonucleotide
gtcagacaaccaggagtcgac

SEQ ID NO: 41921 - DNA, 21 bp, Artificial Sequence
  Description of Artificial Sequence: Synthetic oligonucleotide
gtcagacaaagcagcaacaca

SEQ ID NO: 41922 - DNA, 21 bp, Artificial Sequence
  Description of Artificial Sequence: Synthetic oligonucleotide
gtcagaagagtcgcaagcgaa

SEQ ID NO: 41923 - DNA, 21 bp, Artificial Sequence
  Description of Artificial Sequence: Synthetic oligonucleotide
gtcagaagcgcaatcagcgac

SEQ ID NO: 41924 - DNA, 21 bp, Artificial Sequence
  Description of Artificial Sequence: Synthetic oligonucleotide
gtcagaagcgcaacattccac

SEQ ID NO: 41925 - DNA, 21 bp, Artificial Sequence
  Description of Artificial Sequence: Synthetic oligonucleotide
gtcagaagcctcgaacaaagc

SEQ ID NO: 41926 - DNA, 21 bp, Artificial Sequence
  Description of Artificial Sequence: Synthetic oligonucleotide
gtcagaagcccaagccactgc

SEQ ID NO: 41927 - DNA, 21 bp, Artificial Sequence
  Description of Artificial Sequence: Synthetic oligonucleotide
gtcagaagccaactcccacca

SEQ ID NO: 41928 - DNA, 21 bp, Artificial Sequence
  Description of Artificial Sequence: Synthetic oligonucleotide
gtcagaagcagcctcgacaga

SEQ ID NO: 41929 - DNA, 21 bp, Artificial Sequence
  Description of Artificial Sequence: Synthetic oligonucleotide
gtcagaagcagcacatacaca

SEQ ID NO: 41930 - DNA, 21 bp, Artificial Sequence
  Description of Artificial Sequence: Synthetic oligonucleotide
gtcagaagcgtcgcaccagaa

SEQ ID NO: 41931 - DNA, 21 bp, Artificial Sequence
  Description of Artificial Sequence: Synthetic oligonucleotide
gtcagaacactcccaagccca

SEQ ID NO: 41932 - DNA, 21 bp, Artificial Sequence
  Description of Artificial Sequence: Synthetic oligonucleotide
gtcagaacaatgccacacagc

SEQ ID NO: 41933 - DNA, 21 bp, Artificial Sequence
  Description of Artificial Sequence: Synthetic oligonucleotide
gtcagaacaccattcgaagca

SEQ ID NO: 41934 - DNA, 21 bp, Artificial Sequence
  Description of Artificial Sequence: Synthetic oligonucleotide
gtcagaacacaaggactcagc

SEQ ID NO: 41935 - DNA, 21 bp, Artificial Sequence
  Description of Artificial Sequence: Synthetic oligonucleotide
gtcagaacacaaggaacaaac

SEQ ID NO: 41936 - DNA, 21 bp, Artificial Sequence
  Description of Artificial Sequence: Synthetic oligonucleotide
gtcagaacaagcatcggaaca

SEQ ID NO: 41937 - DNA, 21 bp, Artificial Sequence
  Description of Artificial Sequence: Synthetic oligonucleotide
gtcagaacaagcccaatgagc

SEQ ID NO: 41938 - DNA, 21 bp, Artificial Sequence
  Description of Artificial Sequence: Synthetic oligonucleotide
gtcagagtcgcagtcccaatg

SEQ ID NO: 41939 - DNA, 21 bp, Artificial Sequence
  Description of Artificial Sequence: Synthetic oligonucleotide
gtcagagtcggaacaatcgga

SEQ ID NO: 41940 - DNA, 21 bp, Artificial Sequence
  Description of Artificial Sequence: Synthetic oligonucleotide
gtcagagtcggaacactcaac

SEQ ID NO: 41941 - DNA, 21 bp, Artificial Sequence
  Description of Artificial Sequence: Synthetic oligonucleotide
gtcagagtcatgggaagcagc

SEQ ID NO: 41942 - DNA, 21 bp, Artificial Sequence
  Description of Artificial Sequence: Synthetic oligonucleotide
gtcagcgcagcaagcctcaca

SEQ ID NO: 41943 - DNA, 21 bp, Artificial Sequence
  Description of Artificial Sequence: Synthetic oligonucleotide
gtcagcgcagcaacaagcttc

SEQ ID NO: 41944 - DNA, 21 bp, Artificial Sequence
  Description of Artificial Sequence: Synthetic oligonucleotide
gtcagcgcacacacaaacagc

SEQ ID NO: 41945 - DNA, 21 bp, Artificial Sequence
  Description of Artificial Sequence: Synthetic oligonucleotide
gtcagcgcaatcatggacgtc

SEQ ID NO: 41946 - DNA, 21 bp, Artificial Sequence
  Description of Artificial Sequence: Synthetic oligonucleotide
gtcagcgcaatcagcgcaaca

SEQ ID NO: 41947 - DNA, 21 bp, Artificial Sequence
  Description of Artificial Sequence: Synthetic oligonucleotide
gtcagcgcaccagaagaccac

SEQ ID NO: 41948 - DNA, 21 bp, Artificial Sequence
  Description of Artificial Sequence: Synthetic oligonucleotide
gtcagcgcacaaatcagcatc

SEQ ID NO: 41949 - DNA, 21 bp, Artificial Sequence
  Description of Artificial Sequence: Synthetic oligonucleotide
gtcagcgcaagagaaagcgtc

SEQ ID NO: 41950 - DNA, 21 bp, Artificial Sequence
  Description of Artificial Sequence: Synthetic oligonucleotide
gtcagcgcaagaagcttccaa

SEQ ID NO: 41951 - DNA, 21 bp, Artificial Sequence
  Description of Artificial Sequence: Synthetic oligonucleotide
gtcagcgcaagcgcaggaaga

SEQ ID NO: 41952 - DNA, 21 bp, Artificial Sequence
  Description of Artificial Sequence: Synthetic oligonucleotide
gtcagcgcaagcctcgcactc

SEQ ID NO: 41953 - DNA, 21 bp, Artificial Sequence
  Description of Artificial Sequence: Synthetic oligonucleotide
gtcagcgcaagcagcagcgca

SEQ ID NO: 41954 - DNA, 21 bp, Artificial Sequence
  Description of Artificial Sequence: Synthetic oligonucleotide
gtcagcgcaacacacgtccaa

SEQ ID NO: 41955 - DNA, 21 bp, Artificial Sequence
  Description of Artificial Sequence: Synthetic oligonucleotide
gtcagcgcaacaacaagcgtc

SEQ ID NO: 41956 - DNA, 21 bp, Artificial Sequence
  Description of Artificial Sequence: Synthetic oligonucleotide
gtcagcgacgacaaaagcagc

SEQ ID NO: 41957 - DNA, 21 bp, Artificial Sequence
  Description of Artificial Sequence: Synthetic oligonucleotide
gtcagcgacggaaacaaactc

SEQ ID NO: 41958 - DNA, 21 bp, Artificial Sequence
  Description of Artificial Sequence: Synthetic oligonucleotide
gtcagcgacaacctctggagc

SEQ ID NO: 41959 - DNA, 21 bp, Artificial Sequence
  Description of Artificial Sequence: Synthetic oligonucleotide
gtcagcgacagctaccaatgg

SEQ ID NO: 41960 - DNA, 21 bp, Artificial Sequence
  Description of Artificial Sequence: Synthetic oligonucleotide
gtcagcgacgtcgcattctac

SEQ ID NO: 41961 - DNA, 21 bp, Artificial Sequence
  Description of Artificial Sequence: Synthetic oligonucleotide
gtcagcgacgtcacaagcgac

SEQ ID NO: 41962 - DNA, 21 bp, Artificial Sequence
  Description of Artificial Sequence: Synthetic oligonucleotide
gtcagcgactacctcacacaa

SEQ ID NO: 41963 - DNA, 21 bp, Artificial Sequence
  Description of Artificial Sequence: Synthetic oligonucleotide
gtcagcttcccatacgaagaa

SEQ ID NO: 41964 - DNA, 21 bp, Artificial Sequence
  Description of Artificial Sequence: Synthetic oligonucleotide
gtcagcttccaaccactcgga

SEQ ID NO: 41965 - DNA, 21 bp, Artificial Sequence
  Description of Artificial Sequence: Synthetic oligonucleotide
gtcagcggattcaaccaacac

SEQ ID NO: 41966 - DNA, 21 bp, Artificial Sequence
  Description of Artificial Sequence: Synthetic oligonucleotide
gtcagcggaccaaaccactac

SEQ ID NO: 41967 - DNA, 21 bp, Artificial Sequence
  Description of Artificial Sequence: Synthetic oligonucleotide
gtcagcggaagcctccaatac

SEQ ID NO: 41968 - DNA, 21 bp, Artificial Sequence
  Description of Artificial Sequence: Synthetic oligonucleotide
gtcagcggaagcacaagaaca

SEQ ID NO: 41969 - DNA, 21 bp, Artificial Sequence
  Description of Artificial Sequence: Synthetic oligonucleotide
gtcagccacgcaacacaccaa

SEQ ID NO: 41970 - DNA, 21 bp, Artificial Sequence
  Description of Artificial Sequence: Synthetic oligonucleotide
gtcagccacggaatgaacatg

SEQ ID NO: 41971 - DNA, 21 bp, Artificial Sequence
  Description of Artificial Sequence: Synthetic oligonucleotide
gtcagccacggaatgagcagc

SEQ ID NO: 41972 - DNA, 21 bp, Artificial Sequence
  Description of Artificial Sequence: Synthetic oligonucleotide
gtcagccacccaaacgcacca

SEQ ID NO: 41973 - DNA, 21 bp, Artificial Sequence
  Description of Artificial Sequence: Synthetic oligonucleotide
gtcagccacacaatgcaagaa

SEQ ID NO: 41974 - DNA, 21 bp, Artificial Sequence
  Description of Artificial Sequence: Synthetic oligonucleotide
gtcagcatcgcaggagcaagc

SEQ ID NO: 41975 - DNA, 21 bp, Artificial Sequence
  Description of Artificial Sequence: Synthetic oligonucleotide
gtcagcatcagcatcccaagc

SEQ ID NO: 41976 - DNA, 21 bp, Artificial Sequence
  Description of Artificial Sequence: Synthetic oligonucleotide
gtcagcatcagcatgccacca

SEQ ID NO: 41977 - DNA, 21 bp, Artificial Sequence
  Description of Artificial Sequence: Synthetic oligonucleotide
gtcagcaaagaaatgatcctc

SEQ ID NO: 41978 - DNA, 21 bp, Artificial Sequence
  Description of Artificial Sequence: Synthetic oligonucleotide
gtcagcaaaccaacaaacagc

SEQ ID NO: 41979 - DNA, 21 bp, Artificial Sequence
  Description of Artificial Sequence: Synthetic oligonucleotide
gtcagcaaaagcatcagcagc

SEQ ID NO: 41980 - DNA, 21 bp, Artificial Sequence
  Description of Artificial Sequence: Synthetic oligonucleotide
gtcagcctcggatacccagac

SEQ ID NO: 41981 - DNA, 21 bp, Artificial Sequence
  Description of Artificial Sequence: Synthetic oligonucleotide
gtcagcctcctcccaacaagc

SEQ ID NO: 41982 - DNA, 21 bp, Artificial Sequence
  Description of Artificial Sequence: Synthetic oligonucleotide
gtcagcctcctcacaagcaaa

SEQ ID NO: 41983 - DNA, 21 bp, Artificial Sequence
  Description of Artificial Sequence: Synthetic oligonucleotide
gtcagcctcccacaagaaaga

SEQ ID NO: 41984 - DNA, 21 bp, Artificial Sequence
  Description of Artificial Sequence: Synthetic oligonucleotide
gtcagcctccaaggaatcgac

SEQ ID NO: 41985 - DNA, 21 bp, Artificial Sequence
  Description of Artificial Sequence: Synthetic oligonucleotide
gtcagcctcagagcaccaaca

SEQ ID NO: 41986 - DNA, 21 bp, Artificial Sequence
  Description of Artificial Sequence: Synthetic oligonucleotide
gtcagcctcagacacacagca

SEQ ID NO: 41987 - DNA, 21 bp, Artificial Sequence
  Description of Artificial Sequence: Synthetic oligonucleotide
gtcagcctcagcccaatcagc

SEQ ID NO: 41988 - DNA, 21 bp, Artificial Sequence
  Description of Artificial Sequence: Synthetic oligonucleotide
gtcagcctcagcacaacagca

SEQ ID NO: 41989 - DNA, 21 bp, Artificial Sequence
  Description of Artificial Sequence: Synthetic oligonucleotide
gtcagcctcacactcagcagc

SEQ ID NO: 41990 - DNA, 21 bp, Artificial Sequence
  Description of Artificial Sequence: Synthetic oligonucleotide
gtcagcatgggaagaccactc

SEQ ID NO: 41991 - DNA, 21 bp, Artificial Sequence
  Description of Artificial Sequence: Synthetic oligonucleotide
gtcagcatgcacctcgaacca

SEQ ID NO: 41992 - DNA, 21 bp, Artificial Sequence
  Description of Artificial Sequence: Synthetic oligonucleotide
gtcagcatgaaaaacctccac

SEQ ID NO: 41993 - DNA, 21 bp, Artificial Sequence
  Description of Artificial Sequence: Synthetic oligonucleotide
gtcagcatgatggaaccagaa

SEQ ID NO: 41994 - DNA, 21 bp, Artificial Sequence
  Description of Artificial Sequence: Synthetic oligonucleotide
gtcagcatgccaagcagaagc

SEQ ID NO: 41995 - DNA, 21 bp, Artificial Sequence
  Description of Artificial Sequence: Synthetic oligonucleotide
gtcagcaacgcagcaagaatg

SEQ ID NO: 41996 - DNA, 21 bp, Artificial Sequence
  Description of Artificial Sequence: Synthetic oligonucleotide
gtcagcaacttccaaaaccca

SEQ ID NO: 41997 - DNA, 21 bp, Artificial Sequence
  Description of Artificial Sequence: Synthetic oligonucleotide
gtcagcaacatcagcagccca

SEQ ID NO: 41998 - DNA, 21 bp, Artificial Sequence
  Description of Artificial Sequence: Synthetic oligonucleotide
gtcagcaacatgcaattcgca

SEQ ID NO: 41999 - DNA, 21 bp, Artificial Sequence
  Description of Artificial Sequence: Synthetic oligonucleotide
gtcagcaacccagacctcatg

SEQ ID NO: 42000 - DNA, 21 bp, Artificial Sequence
  Description of Artificial Sequence: Synthetic oligonucleotide
gtcagcaacccacaagtcagc

SEQ ID NO: 42001 - DNA, 21 bp, Artificial Sequence
  Description of Artificial Sequence: Synthetic oligonucleotide
gtcagcaaccaagcaggatac

SEQ ID NO: 42002 - DNA, 21 bp, Artificial Sequence
  Description of Artificial Sequence: Synthetic oligonucleotide
gtcagcaaccaaaaacaagtc

SEQ ID NO: 42003 - DNA, 21 bp, Artificial Sequence
  Description of Artificial Sequence: Synthetic oligonucleotide
gtcagcaacagaagcacacaa

SEQ ID NO: 42004 - DNA, 21 bp, Artificial Sequence
  Description of Artificial Sequence: Synthetic oligonucleotide
gtcagcaacagcatggcacac

SEQ ID NO: 42005 - DNA, 21 bp, Artificial Sequence
  Description of Artificial Sequence: Synthetic oligonucleotide
gtcagcaacacactcctcgtc

SEQ ID NO: 42006 - DNA, 21 bp, Artificial Sequence
  Description of Artificial Sequence: Synthetic oligonucleotide
gtcagcccagcattccacaaa

SEQ ID NO: 42007 - DNA, 21 bp, Artificial Sequence
  Description of Artificial Sequence: Synthetic oligonucleotide
gtcagcccagcatggcacgga

SEQ ID NO: 42008 - DNA, 21 bp, Artificial Sequence
  Description of Artificial Sequence: Synthetic oligonucleotide
gtcagcccagaagaagacaga

SEQ ID NO: 42009 - DNA, 21 bp, Artificial Sequence
  Description of Artificial Sequence: Synthetic oligonucleotide
gtcagcccagaaccactcaga

SEQ ID NO: 42010 - DNA, 21 bp, Artificial Sequence
  Description of Artificial Sequence: Synthetic oligonucleotide
gtcagcccaggaaacccagca

SEQ ID NO: 42011 - DNA, 21 bp, Artificial Sequence
  Description of Artificial Sequence: Synthetic oligonucleotide
gtcagcccacacccagtccac

SEQ ID NO: 42012 - DNA, 21 bp, Artificial Sequence
  Description of Artificial Sequence: Synthetic oligonucleotide
gtcagcccactcctcccaagc

SEQ ID NO: 42013 - DNA, 21 bp, Artificial Sequence
  Description of Artificial Sequence: Synthetic oligonucleotide
gtcagcccactcaacacaagc

SEQ ID NO: 42014 - DNA, 21 bp, Artificial Sequence
  Description of Artificial Sequence: Synthetic oligonucleotide
gtcagcccaatgacagaaatc

SEQ ID NO: 42015 - DNA, 21 bp, Artificial Sequence
  Description of Artificial Sequence: Synthetic oligonucleotide
gtcagcccaagaccaggacaa

SEQ ID NO: 42016 - DNA, 21 bp, Artificial Sequence
  Description of Artificial Sequence: Synthetic oligonucleotide
gtcagcccaagcaacagagga

SEQ ID NO: 42017 - DNA, 21 bp, Artificial Sequence
  Description of Artificial Sequence: Synthetic oligonucleotide
gtcagcccaagcagcgcactc

SEQ ID NO: 42018 - DNA, 21 bp, Artificial Sequence
  Description of Artificial Sequence: Synthetic oligonucleotide
gtcagcccaacacaacacttc

SEQ ID NO: 42019 - DNA, 21 bp, Artificial Sequence
  Description of Artificial Sequence: Synthetic oligonucleotide
gtcagcccaacatacagcctc

SEQ ID NO: 42020 - DNA, 21 bp, Artificial Sequence
  Description of Artificial Sequence: Synthetic oligonucleotide
gtcagcccagtctacacaagc

SEQ ID NO: 42021 - DNA, 21 bp, Artificial Sequence
  Description of Artificial Sequence: Synthetic oligonucleotide
gtcagcccatacccaagagac

SEQ ID NO: 42022 - DNA, 21 bp, Artificial Sequence
  Description of Artificial Sequence: Synthetic oligonucleotide
gtcagccaactcggaagccca

SEQ ID NO: 42023 - DNA, 21 bp, Artificial Sequence
  Description of Artificial Sequence: Synthetic oligonucleotide
gtcagccaactcacacaagtc

SEQ ID NO: 42024 - DNA, 21 bp, Artificial Sequence
  Description of Artificial Sequence: Synthetic oligonucleotide
gtcagccaaccaagctacgga

SEQ ID NO: 42025 - DNA, 21 bp, Artificial Sequence
  Description of Artificial Sequence: Synthetic oligonucleotide
gtcagccaaagctacacaaac

SEQ ID NO: 42026 - DNA, 21 bp, Artificial Sequence
  Description of Artificial Sequence: Synthetic oligonucleotide
gtcagccaagtcaaacaagga

SEQ ID NO: 42027 - DNA, 21 bp, Artificial Sequence
  Description of Artificial Sequence: Synthetic oligonucleotide
gtcagcagagcaacaccaaac

SEQ ID NO: 42028 - DNA, 21 bp, Artificial Sequence
  Description of Artificial Sequence: Synthetic oligonucleotide
gtcagcagagaaatcaacagc

SEQ ID NO: 42029 - DNA, 21 bp, Artificial Sequence
  Description of Artificial Sequence: Synthetic oligonucleotide
gtcagcagacaagacagcctc

SEQ ID NO: 42030 - DNA, 21 bp, Artificial Sequence
  Description of Artificial Sequence: Synthetic oligonucleotide
gtcagcagaagcggaaacagc

SEQ ID NO: 42031 - DNA, 21 bp, Artificial Sequence
  Description of Artificial Sequence: Synthetic oligonucleotide
gtcagcagaacaatggacaca

SEQ ID NO: 42032 - DNA, 21 bp, Artificial Sequence
  Description of Artificial Sequence: Synthetic oligonucleotide
gtcagcagagtcgaactcgca

SEQ ID NO: 42033 - DNA, 21 bp, Artificial Sequence
  Description of Artificial Sequence: Synthetic oligonucleotide
gtcagcagcgcacacagcatc

SEQ ID NO: 42034 - DNA, 21 bp, Artificial Sequence
  Description of Artificial Sequence: Synthetic oligonucleotide
gtcagcagcgcacacacaagc

SEQ ID NO: 42035 - DNA, 21 bp, Artificial Sequence
  Description of Artificial Sequence: Synthetic oligonucleotide
gtcagcagcgcaatcagctac

SEQ ID NO: 42036 - DNA, 21 bp, Artificial Sequence
  Description of Artificial Sequence: Synthetic oligonucleotide
gtcagcagcgcaagaggaaca

SEQ ID NO: 42037 - DNA, 21 bp, Artificial Sequence
  Description of Artificial Sequence: Synthetic oligonucleotide
gtcagcagcgcaagcccaatg

SEQ ID NO: 42038 - DNA, 21 bp, Artificial Sequence
  Description of Artificial Sequence: Synthetic oligonucleotide
gtcagcagcgacagactcctc

SEQ ID NO: 42039 - DNA, 21 bp, Artificial Sequence
  Description of Artificial Sequence: Synthetic oligonucleotide
gtcagcagcgactacagcaac

SEQ ID NO: 42040 - DNA, 21 bp, Artificial Sequence
  Description of Artificial Sequence: Synthetic oligonucleotide
gtcagcagcttcctcgaagac

SEQ ID NO: 42041 - DNA, 21 bp, Artificial Sequence
  Description of Artificial Sequence: Synthetic oligonucleotide
gtcagcagcctcgaactcgca

SEQ ID NO: 42042 - DNA, 21 bp, Artificial Sequence
  Description of Artificial Sequence: Synthetic oligonucleotide
gtcagcagcctcaaaacatac

SEQ ID NO: 42043 - DNA, 21 bp, Artificial Sequence
  Description of Artificial Sequence: Synthetic oligonucleotide
gtcagcagcctcagaggacca

SEQ ID NO: 42044 - DNA, 21 bp, Artificial Sequence
  Description of Artificial Sequence: Synthetic oligonucleotide
gtcagcagcctcagcagcctc

SEQ ID NO: 42045 - DNA, 21 bp, Artificial Sequence
  Description of Artificial Sequence: Synthetic oligonucleotide
gtcagcagcatgctcgacgca

SEQ ID NO: 42046 - DNA, 21 bp, Artificial Sequence
  Description of Artificial Sequence: Synthetic oligonucleotide
gtcagcagcatgaacatcgtc

SEQ ID NO: 42047 - DNA, 21 bp, Artificial Sequence
  Description of Artificial Sequence: Synthetic oligonucleotide
gtcagcagcatgccagtccca

SEQ ID NO: 42048 - DNA, 21 bp, Artificial Sequence
  Description of Artificial Sequence: Synthetic oligonucleotide
gtcagcagcaacagcttcgca

SEQ ID NO: 42049 - DNA, 21 bp, Artificial Sequence
  Description of Artificial Sequence: Synthetic oligonucleotide
gtcagcagcccagacagcaac

SEQ ID NO: 42050 - DNA, 21 bp, Artificial Sequence
  Description of Artificial Sequence: Synthetic oligonucleotide
gtcagcagcccactcagcgga

SEQ ID NO: 42051 - DNA, 21 bp, Artificial Sequence
  Description of Artificial Sequence: Synthetic oligonucleotide
gtcagcagcccaccagacctc

SEQ ID NO: 42052 - DNA, 21 bp, Artificial Sequence
  Description of Artificial Sequence: Synthetic oligonucleotide
gtcagcagcccaagagaacac

SEQ ID NO: 42053 - DNA, 21 bp, Artificial Sequence
  Description of Artificial Sequence: Synthetic oligonucleotide
gtcagcagccaaaacgtcttc

SEQ ID NO: 42054 - DNA, 21 bp, Artificial Sequence
  Description of Artificial Sequence: Synthetic oligonucleotide
gtcagcagccaaagaaacgga

SEQ ID NO: 42055 - DNA, 21 bp, Artificial Sequence
  Description of Artificial Sequence: Synthetic oligonucleotide
gtcagcagcagataccacgca

SEQ ID NO: 42056 - DNA, 21 bp, Artificial Sequence
  Description of Artificial Sequence: Synthetic oligonucleotide
gtcagcagcagcggaatgaca

SEQ ID NO: 42057 - DNA, 21 bp, Artificial Sequence
  Description of Artificial Sequence: Synthetic oligonucleotide
gtcagcagcagcctcatgagc

SEQ ID NO: 42058 - DNA, 21 bp, Artificial Sequence
  Description of Artificial Sequence: Synthetic oligonucleotide
gtcagcagcagccaaatgcca

SEQ ID NO: 42059 - DNA, 21 bp, Artificial Sequence
  Description of Artificial Sequence: Synthetic oligonucleotide
gtcagcagcagcgtcctcaga

SEQ ID NO: 42060 - DNA, 21 bp, Artificial Sequence
  Description of Artificial Sequence: Synthetic oligonucleotide
gtcagcagcacaatcgtcatg

SEQ ID NO: 42061 - DNA, 21 bp, Artificial Sequence
  Description of Artificial Sequence: Synthetic oligonucleotide
gtcagcagcgtcgtcagcgga

SEQ ID NO: 42062 - DNA, 21 bp, Artificial Sequence
  Description of Artificial Sequence: Synthetic oligonucleotide
gtcagcacagcacaccaaagc

SEQ ID NO: 42063 - DNA, 21 bp, Artificial Sequence
  Description of Artificial Sequence: Synthetic oligonucleotide
gtcagcacattcggaccaaca

SEQ ID NO: 42064 - DNA, 21 bp, Artificial Sequence
  Description of Artificial Sequence: Synthetic oligonucleotide
gtcagcacaggactcacaaaa

SEQ ID NO: 42065 - DNA, 21 bp, Artificial Sequence
  Description of Artificial Sequence: Synthetic oligonucleotide
gtcagcacaggatacgcagtc

SEQ ID NO: 42066 - DNA, 21 bp, Artificial Sequence
  Description of Artificial Sequence: Synthetic oligonucleotide
gtcagcacaatcgcattcgaa

SEQ ID NO: 42067 - DNA, 21 bp, Artificial Sequence
  Description of Artificial Sequence: Synthetic oligonucleotide
gtcagcacaatcagcagcctc

SEQ ID NO: 42068 - DNA, 21 bp, Artificial Sequence
  Description of Artificial Sequence: Synthetic oligonucleotide
gtcagcacactccaagcagga

SEQ ID NO: 42069 - DNA, 21 bp, Artificial Sequence
  Description of Artificial Sequence: Synthetic oligonucleotide
gtcagcacaatgagaagccca

SEQ ID NO: 42070 - DNA, 21 bp, Artificial Sequence
  Description of Artificial Sequence: Synthetic oligonucleotide
gtcagcacaccaaacaacaaa

SEQ ID NO: 42071 - DNA, 21 bp, Artificial Sequence
  Description of Artificial Sequence: Synthetic oligonucleotide
gtcagcacacaaacatacaaa

SEQ ID NO: 42072 - DNA, 21 bp, Artificial Sequence
  Description of Artificial Sequence: Synthetic oligonucleotide
gtcagcacaagacaactcctc

SEQ ID NO: 42073 - DNA, 21 bp, Artificial Sequence
  Description of Artificial Sequence: Synthetic oligonucleotide
gtcagcacaagcgtcctcaga

SEQ ID NO: 42074 - DNA, 21 bp, Artificial Sequence
  Description of Artificial Sequence: Synthetic oligonucleotide
gtcagcacaacattcaaagtc

SEQ ID NO: 42075 - DNA, 21 bp, Artificial Sequence
  Description of Artificial Sequence: Synthetic oligonucleotide
gtcagcgtcaaagtccacgac

SEQ ID NO: 42076 - DNA, 21 bp, Artificial Sequence
  Description of Artificial Sequence: Synthetic oligonucleotide
gtcagcgtccaaagcagcaga

SEQ ID NO: 42077 - DNA, 21 bp, Artificial Sequence
  Description of Artificial Sequence: Synthetic oligonucleotide
gtcagcgtcagcacacaccac

SEQ ID NO: 42078 - DNA, 21 bp, Artificial Sequence
  Description of Artificial Sequence: Synthetic oligonucleotide
gtcagcgtcagcgtcggagaa

SEQ ID NO: 42079 - DNA, 21 bp, Artificial Sequence
  Description of Artificial Sequence: Synthetic oligonucleotide
gtcagcgtcacagcaggagga

SEQ ID NO: 42080 - DNA, 21 bp, Artificial Sequence
  Description of Artificial Sequence: Synthetic oligonucleotide
gtcagcgtcacaagcgcagga

SEQ ID NO: 42081 - DNA, 21 bp, Artificial Sequence
  Description of Artificial Sequence: Synthetic oligonucleotide
gtcagctacgcaatggaaaac

SEQ ID NO: 42082 - DNA, 21 bp, Artificial Sequence
  Description of Artificial Sequence: Synthetic oligonucleotide
gtcagctacccagcacaagca

SEQ ID NO: 42083 - DNA, 21 bp, Artificial Sequence
  Description of Artificial Sequence: Synthetic oligonucleotide
gtcacagcaggaccaatgaga

SEQ ID NO: 42084 - DNA, 21 bp, Artificial Sequence
  Description of Artificial Sequence: Synthetic oligonucleotide
gtcacagcactcacaatcgca

SEQ ID NO: 42085 - DNA, 21 bp, Artificial Sequence
  Description of Artificial Sequence: Synthetic oligonucleotide
gtcacagcactcgtcaaagac

SEQ ID NO: 42086 - DNA, 21 bp, Artificial Sequence
  Description of Artificial Sequence: Synthetic oligonucleotide
gtcacagcaaacctcccacaa

SEQ ID NO: 42087 - DNA, 21 bp, Artificial Sequence
  Description of Artificial Sequence: Synthetic oligonucleotide
gtcacagcaaacgtcctccca

SEQ ID NO: 42088 - DNA, 21 bp, Artificial Sequence
  Description of Artificial Sequence: Synthetic oligonucleotide
gtcacagcaccagtcacagga

SEQ ID NO: 42089 - DNA, 21 bp, Artificial Sequence
  Description of Artificial Sequence: Synthetic oligonucleotide
gtcacagcacaaagcagcgtc

SEQ ID NO: 42090 - DNA, 21 bp, Artificial Sequence
  Description of Artificial Sequence: Synthetic oligonucleotide
gtcacagcaagaagcctcgca

SEQ ID NO: 42091 - DNA, 21 bp, Artificial Sequence
  Description of Artificial Sequence: Synthetic oligonucleotide
gtcacagcaagccacagagtc

SEQ ID NO: 42092 - DNA, 21 bp, Artificial Sequence
  Description of Artificial Sequence: Synthetic oligonucleotide
gtcacagacgcagtcacaaca

SEQ ID NO: 42093 - DNA, 21 bp, Artificial Sequence
  Description of Artificial Sequence: Synthetic oligonucleotide
gtcacagacaacgtcagaaac

SEQ ID NO: 42094 - DNA, 21 bp, Artificial Sequence
  Description of Artificial Sequence: Synthetic oligonucleotide
gtcacagacagcacagacgac

SEQ ID NO: 42095 - DNA, 21 bp, Artificial Sequence
  Description of Artificial Sequence: Synthetic oligonucleotide
gtcacagacacaagagaaaga

SEQ ID NO: 42096 - DNA, 21 bp, Artificial Sequence
  Description of Artificial Sequence: Synthetic oligonucleotide
gtcacagaagcaagaagcgca

SEQ ID NO: 42097 - DNA, 21 bp, Artificial Sequence
  Description of Artificial Sequence: Synthetic oligonucleotide
gtcacagaagaaagcgacatg

SEQ ID NO: 42098 - DNA, 21 bp, Artificial Sequence
  Description of Artificial Sequence: Synthetic oligonucleotide
gtcacagaagaaagcaacaca

SEQ ID NO: 42099 - DNA, 21 bp, Artificial Sequence
  Description of Artificial Sequence: Synthetic oligonucleotide
gtcacagaacacctcaaaaac

SEQ ID NO: 42100 - DNA, 21 bp, Artificial Sequence
  Description of Artificial Sequence: Synthetic oligonucleotide
gtcacagaaagaatgacactc

SEQ ID NO: 42101 - DNA, 21 bp, Artificial Sequence
  Description of Artificial Sequence: Synthetic oligonucleotide
gtcacattcagcagcagcgga

SEQ ID NO: 42102 - DNA, 21 bp, Artificial Sequence
  Description of Artificial Sequence: Synthetic oligonucleotide
gtcacaggagcaagactcgca

SEQ ID NO: 42103 - DNA, 21 bp, Artificial Sequence
  Description of Artificial Sequence: Synthetic oligonucleotide
gtcacaggacacgcaatcctc

SEQ ID NO: 42104 - DNA, 21 bp, Artificial Sequence
  Description of Artificial Sequence: Synthetic oligonucleotide
gtcacaggaaaaccaagcctc

SEQ ID NO: 42105 - DNA, 21 bp, Artificial Sequence
  Description of Artificial Sequence: Synthetic oligonucleotide
gtcacaggaccaggactcaga

SEQ ID NO: 42106 - DNA, 21 bp, Artificial Sequence
  Description of Artificial Sequence: Synthetic oligonucleotide
gtcacaggaacaagaacagtc

SEQ ID NO: 42107 - DNA, 21 bp, Artificial Sequence
  Description of Artificial Sequence: Synthetic oligonucleotide
gtcacacacctcatgcaagga

SEQ ID NO: 42108 - DNA, 21 bp, Artificial Sequence
  Description of Artificial Sequence: Synthetic oligonucleotide
gtcacacacccaaacctcagc

SEQ ID NO: 42109 - DNA, 21 bp, Artificial Sequence
  Description of Artificial Sequence: Synthetic oligonucleotide
gtcacacacacagaattccca

SEQ ID NO: 42110 - DNA, 21 bp, Artificial Sequence
  Description of Artificial Sequence: Synthetic oligonucleotide
gtcacacacacaggacacaaa

SEQ ID NO: 42111 - DNA, 21 bp, Artificial Sequence
  Description of Artificial Sequence: Synthetic oligonucleotide
gtcacacactacagcagcgtc

SEQ ID NO: 42112 - DNA, 21 bp, Artificial Sequence
  Description of Artificial Sequence: Synthetic oligonucleotide
gtcacaatcgacgactaccca

SEQ ID NO: 42113 - DNA, 21 bp, Artificial Sequence
  Description of Artificial Sequence: Synthetic oligonucleotide
gtcacaaaagcaagcgcacca

SEQ ID NO: 42114 - DNA, 21 bp, Artificial Sequence
  Description of Artificial Sequence: Synthetic oligonucleotide
gtcacactcaaaccactcagc

SEQ ID NO: 42115 - DNA, 21 bp, Artificial Sequence
  Description of Artificial Sequence: Synthetic oligonucleotide
gtcacactcctcgcaagcaga

SEQ ID NO: 42116 - DNA, 21 bp, Artificial Sequence
  Description of Artificial Sequence: Synthetic oligonucleotide
gtcacactcccactcacaaga

SEQ ID NO: 42117 - DNA, 21 bp, Artificial Sequence
  Description of Artificial Sequence: Synthetic oligonucleotide
gtcacactccaaagaccagga

SEQ ID NO: 42118 - DNA, 21 bp, Artificial Sequence
  Description of Artificial Sequence: Synthetic oligonucleotide
gtcacactcagcgcagaagga

SEQ ID NO: 42119 - DNA, 21 bp, Artificial Sequence
  Description of Artificial Sequence: Synthetic oligonucleotide
gtcacactcagcgacagactc

SEQ ID NO: 42120 - DNA, 21 bp, Artificial Sequence
  Description of Artificial Sequence: Synthetic oligonucleotide
gtcacaatgagcacaatcaga

SEQ ID NO: 42121 - DNA, 21 bp, Artificial Sequence
  Description of Artificial Sequence: Synthetic oligonucleotide
gtcacaaacagagtccaccca

SEQ ID NO: 42122 - DNA, 21 bp, Artificial Sequence
  Description of Artificial Sequence: Synthetic oligonucleotide
gtcacaccagacctcagacac

SEQ ID NO: 42123 - DNA, 21 bp, Artificial Sequence
  Description of Artificial Sequence: Synthetic oligonucleotide
gtcacaccagacagcctcaaa

SEQ ID NO: 42124 - DNA, 21 bp, Artificial Sequence
  Description of Artificial Sequence: Synthetic oligonucleotide
gtcacaccagactacagaaac

SEQ ID NO: 42125 - DNA, 21 bp, Artificial Sequence
  Description of Artificial Sequence: Synthetic oligonucleotide
gtcacaccaggactcgcatac

SEQ ID NO: 42126 - DNA, 21 bp, Artificial Sequence
  Description of Artificial Sequence: Synthetic oligonucleotide
gtcacaccactcctcacagca

SEQ ID NO: 42127 - DNA, 21 bp, Artificial Sequence
  Description of Artificial Sequence: Synthetic oligonucleotide
gtcacaccacaaacaaacttc

SEQ ID NO: 42128 - DNA, 21 bp, Artificial Sequence
  Description of Artificial Sequence: Synthetic oligonucleotide
gtcacaccagtcggaaaaaca

SEQ ID NO: 42129 - DNA, 21 bp, Artificial Sequence
  Description of Artificial Sequence: Synthetic oligonucleotide
gtcacacaacacacaagcaca

SEQ ID NO: 42130 - DNA, 21 bp, Artificial Sequence
  Description of Artificial Sequence: Synthetic oligonucleotide
gtcacacaaatcctcagaaca

SEQ ID NO: 42131 - DNA, 21 bp, Artificial Sequence
  Description of Artificial Sequence: Synthetic oligonucleotide
gtcacacaaccacacgcaagc

SEQ ID NO: 42132 - DNA, 21 bp, Artificial Sequence
  Description of Artificial Sequence: Synthetic oligonucleotide
gtcacaagagcactccacgac

SEQ ID NO: 42133 - DNA, 21 bp, Artificial Sequence
  Description of Artificial Sequence: Synthetic oligonucleotide
gtcacaagaatggaaagcgca

SEQ ID NO: 42134 - DNA, 21 bp, Artificial Sequence
  Description of Artificial Sequence: Synthetic oligonucleotide
gtcacaagcgcactcgtcaga

SEQ ID NO: 42135 - DNA, 21 bp, Artificial Sequence
  Description of Artificial Sequence: Synthetic oligonucleotide
gtcacaagcgcaatgcaagga

SEQ ID NO: 42136 - DNA, 21 bp, Artificial Sequence
  Description of Artificial Sequence: Synthetic oligonucleotide
gtcacaagcgcaagcacacac

SEQ ID NO: 42137 - DNA, 21 bp, Artificial Sequence
  Description of Artificial Sequence: Synthetic oligonucleotide
gtcacaagcttcgtcgcacca

SEQ ID NO: 42138 - DNA, 21 bp, Artificial Sequence
  Description of Artificial Sequence: Synthetic oligonucleotide
gtcacaagccacacaggagaa

SEQ ID NO: 42139 - DNA, 21 bp, Artificial Sequence
  Description of Artificial Sequence: Synthetic oligonucleotide
gtcacaagcccaacattcgaa

SEQ ID NO: 42140 - DNA, 21 bp, Artificial Sequence
  Description of Artificial Sequence: Synthetic oligonucleotide
gtcacaagcagaagcgcagtc

SEQ ID NO: 42141 - DNA, 21 bp, Artificial Sequence
  Description of Artificial Sequence: Synthetic oligonucleotide
gtcacaagcagcacacaactc

SEQ ID NO: 42142 - DNA, 21 bp, Artificial Sequence
  Description of Artificial Sequence: Synthetic oligonucleotide
gtcacaagcacaagcacaaac

SEQ ID NO: 42143 - DNA, 21 bp, Artificial Sequence
  Description of Artificial Sequence: Synthetic oligonucleotide
gtcacaagcgtcagcccaatc

SEQ ID NO: 42144 - DNA, 21 bp, Artificial Sequence
  Description of Artificial Sequence: Synthetic oligonucleotide
gtcacaacagcaacaggaatc

SEQ ID NO: 42145 - DNA, 21 bp, Artificial Sequence
  Description of Artificial Sequence: Synthetic oligonucleotide
gtcacaacagaaccaagattc

SEQ ID NO: 42146 - DNA, 21 bp, Artificial Sequence
  Description of Artificial Sequence: Synthetic oligonucleotide
gtcacaacaatcagagcacac

SEQ ID NO: 42147 - DNA, 21 bp, Artificial Sequence
  Description of Artificial Sequence: Synthetic oligonucleotide
gtcacaacaaaacaaacatgc

SEQ ID NO: 42148 - DNA, 21 bp, Artificial Sequence
  Description of Artificial Sequence: Synthetic oligonucleotide
gtcacaacaaacggaccaatc

SEQ ID NO: 42149 - DNA, 21 bp, Artificial Sequence
  Description of Artificial Sequence: Synthetic oligonucleotide
gtcacaacacaattcgaaagc

SEQ ID NO: 42150 - DNA, 21 bp, Artificial Sequence
  Description of Artificial Sequence: Synthetic oligonucleotide
gtcacaacaagaccataccca

SEQ ID NO: 42151 - DNA, 21 bp, Artificial Sequence
  Description of Artificial Sequence: Synthetic oligonucleotide
gtcacaacaagcagatacctc

SEQ ID NO: 42152 - DNA, 21 bp, Artificial Sequence
  Description of Artificial Sequence: Synthetic oligonucleotide
gtcacaacaagcacaagcaga

SEQ ID NO: 42153 - DNA, 21 bp, Artificial Sequence
  Description of Artificial Sequence: Synthetic oligonucleotide
gtcacaacaacacaaatcaca

SEQ ID NO: 42154 - DNA, 21 bp, Artificial Sequence
  Description of Artificial Sequence: Synthetic oligonucleotide
gtcacaacagtcatcctcgac

SEQ ID NO: 42155 - DNA, 21 bp, Artificial Sequence
  Description of Artificial Sequence: Synthetic oligonucleotide
gtcacagtccacagccacttc

SEQ ID NO: 42156 - DNA, 21 bp, Artificial Sequence
  Description of Artificial Sequence: Synthetic oligonucleotide
gtcacagtcccactcccaagc

SEQ ID NO: 42157 - DNA, 21 bp, Artificial Sequence
  Description of Artificial Sequence: Synthetic oligonucleotide
gtcacagtccaaatgaacgtc

SEQ ID NO: 42158 - DNA, 21 bp, Artificial Sequence
  Description of Artificial Sequence: Synthetic oligonucleotide
gtcacagtcagaggaagcatc

SEQ ID NO: 42159 - DNA, 21 bp, Artificial Sequence
  Description of Artificial Sequence: Synthetic oligonucleotide
gtcacagtcacaggaacaatc

SEQ ID NO: 42160 - DNA, 21 bp, Artificial Sequence
  Description of Artificial Sequence: Synthetic oligonucleotide
gtcacatacagcccactcgga

SEQ ID NO: 42161 - DNA, 21 bp, Artificial Sequence
  Description of Artificial Sequence: Synthetic oligonucleotide
gtcgtcgcaggaagaagcagc

SEQ ID NO: 42162 - DNA, 21 bp, Artificial Sequence
  Description of Artificial Sequence: Synthetic oligonucleotide
gtcgtcgcacaaccaggacac

SEQ ID NO: 42163 - DNA, 21 bp, Artificial Sequence
  Description of Artificial Sequence: Synthetic oligonucleotide
gtcgtcgcaacaacactcaac

SEQ ID NO: 42164 - DNA, 21 bp, Artificial Sequence
  Description of Artificial Sequence: Synthetic oligonucleotide
gtcgtcgacagcccaagagca

SEQ ID NO: 42165 - DNA, 21 bp, Artificial Sequence
  Description of Artificial Sequence: Synthetic oligonucleotide
gtcgtcgacgtcccactcaga

SEQ ID NO: 42166 - DNA, 21 bp, Artificial Sequence
  Description of Artificial Sequence: Synthetic oligonucleotide
gtcgtcgaaacattcgaacca

SEQ ID NO: 42167 - DNA, 21 bp, Artificial Sequence
  Description of Artificial Sequence: Synthetic oligonucleotide
gtcgtcggagacggaacaatc

SEQ ID NO: 42168 - DNA, 21 bp, Artificial Sequence
  Description of Artificial Sequence: Synthetic oligonucleotide
gtcgtcggagaccaagcagac

SEQ ID NO: 42169 - DNA, 21 bp, Artificial Sequence
  Description of Artificial Sequence: Synthetic oligonucleotide
gtcgtcggaggacaactcctc

SEQ ID NO: 42170 - DNA, 21 bp, Artificial Sequence
  Description of Artificial Sequence: Synthetic oligonucleotide
gtcgtcggaatcagaggagaa

SEQ ID NO: 42171 - DNA, 21 bp, Artificial Sequence
  Description of Artificial Sequence: Synthetic oligonucleotide
gtcgtcggaatgggaacagga

SEQ ID NO: 42172 - DNA, 21 bp, Artificial Sequence
  Description of Artificial Sequence: Synthetic oligonucleotide
gtcgtcggaccaagcctccca

SEQ ID NO: 42173 - DNA, 21 bp, Artificial Sequence
  Description of Artificial Sequence: Synthetic oligonucleotide
gtcgtcggaagacaagaaaga

SEQ ID NO: 42174 - DNA, 21 bp, Artificial Sequence
  Description of Artificial Sequence: Synthetic oligonucleotide
gtcgtcggaagaagcaaccca

SEQ ID NO: 42175 - DNA, 21 bp, Artificial Sequence
  Description of Artificial Sequence: Synthetic oligonucleotide
gtcgtcggaagcccaacaaga

SEQ ID NO: 42176 - DNA, 21 bp, Artificial Sequence
  Description of Artificial Sequence: Synthetic oligonucleotide
gtcgtcggaagcagcggacca

SEQ ID NO: 42177 - DNA, 21 bp, Artificial Sequence
  Description of Artificial Sequence: Synthetic oligonucleotide
gtcgtccacccaccaggacaa

SEQ ID NO: 42178 - DNA, 21 bp, Artificial Sequence
  Description of Artificial Sequence: Synthetic oligonucleotide
gtcgtccacccaagcccagga

SEQ ID NO: 42179 - DNA, 21 bp, Artificial Sequence
  Description of Artificial Sequence: Synthetic oligonucleotide
gtcgtccacagcaacgaacca

SEQ ID NO: 42180 - DNA, 21 bp, Artificial Sequence
  Description of Artificial Sequence: Synthetic oligonucleotide
gtcgtccacacaatgagcgtc

SEQ ID NO: 42181 - DNA, 21 bp, Artificial Sequence
  Description of Artificial Sequence: Synthetic oligonucleotide
gtcgtccacgtcagccaccca

SEQ ID NO: 42182 - DNA, 21 bp, Artificial Sequence
  Description of Artificial Sequence: Synthetic oligonucleotide
gtcgtccacgtcgtcaacagc

SEQ ID NO: 42183 - DNA, 21 bp, Artificial Sequence
  Description of Artificial Sequence: Synthetic oligonucleotide
gtcgtcatcgaccaaaacgga

SEQ ID NO: 42184 - DNA, 21 bp, Artificial Sequence
  Description of Artificial Sequence: Synthetic oligonucleotide
gtcgtcctcaaagacaaccac

SEQ ID NO: 42185 - DNA, 21 bp, Artificial Sequence
  Description of Artificial Sequence: Synthetic oligonucleotide
gtcgtcatgagagacgaccca

SEQ ID NO: 42186 - DNA, 21 bp, Artificial Sequence
  Description of Artificial Sequence: Synthetic oligonucleotide
gtcgtcaacgcaagcgcaaac

SEQ ID NO: 42187 - DNA, 21 bp, Artificial Sequence
  Description of Artificial Sequence: Synthetic oligonucleotide
gtcgtcaacaacctcagaatc

SEQ ID NO: 42188 - DNA, 21 bp, Artificial Sequence
  Description of Artificial Sequence: Synthetic oligonucleotide
gtcgtcaaccaagcacaactc

SEQ ID NO: 42189 - DNA, 21 bp, Artificial Sequence
  Description of Artificial Sequence: Synthetic oligonucleotide
gtcgtcaacacaaaagcaaac

SEQ ID NO: 42190 - DNA, 21 bp, Artificial Sequence
  Description of Artificial Sequence: Synthetic oligonucleotide
gtcgtcaacacaaaaagcgga

SEQ ID NO: 42191 - DNA, 21 bp, Artificial Sequence
  Description of Artificial Sequence: Synthetic oligonucleotide
gtcgtcccagcactcaaaatg

SEQ ID NO: 42192 - DNA, 21 bp, Artificial Sequence
  Description of Artificial Sequence: Synthetic oligonucleotide
gtcgtcccacacagcagacaa

SEQ ID NO: 42193 - DNA, 21 bp, Artificial Sequence
  Description of Artificial Sequence: Synthetic oligonucleotide
gtcgtcccactcggaccagtc

SEQ ID NO: 42194 - DNA, 21 bp, Artificial Sequence
  Description of Artificial Sequence: Synthetic oligonucleotide
gtcgtcccaagagacccagga

SEQ ID NO: 42195 - DNA, 21 bp, Artificial Sequence
  Description of Artificial Sequence: Synthetic oligonucleotide
gtcgtcccaagaatgacagga

SEQ ID NO: 42196 - DNA, 21 bp, Artificial Sequence
  Description of Artificial Sequence: Synthetic oligonucleotide
gtcgtcccaagaccaggaatg

SEQ ID NO: 42197 - DNA, 21 bp, Artificial Sequence
  Description of Artificial Sequence: Synthetic oligonucleotide
gtcgtcccaagaagcggagac

SEQ ID NO: 42198 - DNA, 21 bp, Artificial Sequence
  Description of Artificial Sequence: Synthetic oligonucleotide
gtcgtcccaacagacgacgga

SEQ ID NO: 42199 - DNA, 21 bp, Artificial Sequence
  Description of Artificial Sequence: Synthetic oligonucleotide
gtcgtccaaccaagagcagga

SEQ ID NO: 42200 - DNA, 21 bp, Artificial Sequence
  Description of Artificial Sequence: Synthetic oligonucleotide
gtcgtccaacaaagcagcctc

SEQ ID NO: 42201 - DNA, 21 bp, Artificial Sequence
  Description of Artificial Sequence: Synthetic oligonucleotide
gtcgtcagagcaagcagcgtc

SEQ ID NO: 42202 - DNA, 21 bp, Artificial Sequence
  Description of Artificial Sequence: Synthetic oligonucleotide
gtcgtcagaggaagcagcgtc

SEQ ID NO: 42203 - DNA, 21 bp, Artificial Sequence
  Description of Artificial Sequence: Synthetic oligonucleotide
gtcgtcagaaacgcaggagga

SEQ ID NO: 42204 - DNA, 21 bp, Artificial Sequence
  Description of Artificial Sequence: Synthetic oligonucleotide
gtcgtcagaaacgcaatcaac

SEQ ID NO: 42205 - DNA, 21 bp, Artificial Sequence
  Description of Artificial Sequence: Synthetic oligonucleotide
gtcgtcagaccaagcggactc

SEQ ID NO: 42206 - DNA, 21 bp, Artificial Sequence
  Description of Artificial Sequence: Synthetic oligonucleotide
gtcgtcagcgcaccactcgtc

SEQ ID NO: 42207 - DNA, 21 bp, Artificial Sequence
  Description of Artificial Sequence: Synthetic oligonucleotide
gtcgtcagcttcgacagagca

SEQ ID NO: 42208 - DNA, 21 bp, Artificial Sequence
  Description of Artificial Sequence: Synthetic oligonucleotide
gtcgtcagcggaagcagacca

SEQ ID NO: 42209 - DNA, 21 bp, Artificial Sequence
  Description of Artificial Sequence: Synthetic oligonucleotide
gtcgtcagccacatcagcgtc

SEQ ID NO: 42210 - DNA, 21 bp, Artificial Sequence
  Description of Artificial Sequence: Synthetic oligonucleotide
gtcgtcagcatcgcaagagtc

SEQ ID NO: 42211 - DNA, 21 bp, Artificial Sequence
  Description of Artificial Sequence: Synthetic oligonucleotide
gtcgtcagccaaccaagccca

SEQ ID NO: 42212 - DNA, 21 bp, Artificial Sequence
  Description of Artificial Sequence: Synthetic oligonucleotide
gtcgtcagcagaccaatcagc

SEQ ID NO: 42213 - DNA, 21 bp, Artificial Sequence
  Description of Artificial Sequence: Synthetic oligonucleotide
gtcgtcagcagaagctacaac

SEQ ID NO: 42214 - DNA, 21 bp, Artificial Sequence
  Description of Artificial Sequence: Synthetic oligonucleotide
gtcgtcagcagagtcgcaagc

SEQ ID NO: 42215 - DNA, 21 bp, Artificial Sequence
  Description of Artificial Sequence: Synthetic oligonucleotide
gtcgtcagcagcggaagcctc

SEQ ID NO: 42216 - DNA, 21 bp, Artificial Sequence
  Description of Artificial Sequence: Synthetic oligonucleotide
gtcgtcagcagcagcctcatg

SEQ ID NO: 42217 - DNA, 21 bp, Artificial Sequence
  Description of Artificial Sequence: Synthetic oligonucleotide
gtcgtcagcacaacactccca

SEQ ID NO: 42218 - DNA, 21 bp, Artificial Sequence
  Description of Artificial Sequence: Synthetic oligonucleotide
gtcgtcagcgtcgcaacaagc

SEQ ID NO: 42219 - DNA, 21 bp, Artificial Sequence
  Description of Artificial Sequence: Synthetic oligonucleotide
gtcgtcacagacagcggagga

SEQ ID NO: 42220 - DNA, 21 bp, Artificial Sequence
  Description of Artificial Sequence: Synthetic oligonucleotide
gtcgtcacaagcgcaagcgga

SEQ ID NO: 42221 - DNA, 21 bp, Artificial Sequence
  Description of Artificial Sequence: Synthetic oligonucleotide
gtcgtcacaacaagaatcaca

SEQ ID NO: 42222 - DNA, 21 bp, Artificial Sequence
  Description of Artificial Sequence: Synthetic oligonucleotide
gtcgtcgtcgcaggaagcgaa

SEQ ID NO: 42223 - DNA, 21 bp, Artificial Sequence
  Description of Artificial Sequence: Synthetic oligonucleotide
gtctgggcagacgacaacgtc

SEQ ID NO: 42224 - DNA, 21 bp, Artificial Sequence
  Description of Artificial Sequence: Synthetic oligonucleotide
gtctgggcaagaggaagcgaa

SEQ ID NO: 42225 - DNA, 21 bp, Artificial Sequence
  Description of Artificial Sequence: Synthetic oligonucleotide
gtctggccagcaagcggaaca

SEQ ID NO: 42226 - DNA, 21 bp, Artificial Sequence
  Description of Artificial Sequence: Synthetic oligonucleotide
gtctggcaaccaagcaacgac

SEQ ID NO: 42227 - DNA, 21 bp, Artificial Sequence
  Description of Artificial Sequence: Synthetic oligonucleotide
gtctggagcggaagcagcgac

SEQ ID NO: 42228 - DNA, 21 bp, Artificial Sequence
  Description of Artificial Sequence: Synthetic oligonucleotide
gtctggacacacgaaacaagc

SEQ ID NO: 42229 - DNA, 21 bp, Artificial Sequence
  Description of Artificial Sequence: Synthetic oligonucleotide
gtctacgcaccagaaaaaaga

SEQ ID NO: 42230 - DNA, 21 bp, Artificial Sequence
  Description of Artificial Sequence: Synthetic oligonucleotide
gtctacgcaacactcccagaa

SEQ ID NO: 42231 - DNA, 21 bp, Artificial Sequence
  Description of Artificial Sequence: Synthetic oligonucleotide
gtctacgaaccaagcaaatac

SEQ ID NO: 42232 - DNA, 21 bp, Artificial Sequence
  Description of Artificial Sequence: Synthetic oligonucleotide
gtctacgaaagcaacagattc

SEQ ID NO: 42233 - DNA, 21 bp, Artificial Sequence
  Description of Artificial Sequence: Synthetic oligonucleotide
gtctacggatacagcggaagc

SEQ ID NO: 42234 - DNA, 21 bp, Artificial Sequence
  Description of Artificial Sequence: Synthetic oligonucleotide
gtctaccacccaaacgaattc

SEQ ID NO: 42235 - DNA, 21 bp, Artificial Sequence
  Description of Artificial Sequence: Synthetic oligonucleotide
gtctacatcggaagacaagaa

SEQ ID NO: 42236 - DNA, 21 bp, Artificial Sequence
  Description of Artificial Sequence: Synthetic oligonucleotide
gtctacaaagcaagcaactac

SEQ ID NO: 42237 - DNA, 21 bp, Artificial Sequence
  Description of Artificial Sequence: Synthetic oligonucleotide
gtctacctcaaaagcagcaca

SEQ ID NO: 42238 - DNA, 21 bp, Artificial Sequence
  Description of Artificial Sequence: Synthetic oligonucleotide
gtctacaacgcaggagtcgac

SEQ ID NO: 42239 - DNA, 21 bp, Artificial Sequence
  Description of Artificial Sequence: Synthetic oligonucleotide
gtctacaacacaagcacagca

SEQ ID NO: 42240 - DNA, 21 bp, Artificial Sequence
  Description of Artificial Sequence: Synthetic oligonucleotide
gtctacccaccaagcacaaca

SEQ ID NO: 42241 - DNA, 21 bp, Artificial Sequence
  Description of Artificial Sequence: Synthetic oligonucleotide
gtctacccaagagacctcaca

SEQ ID NO: 42242 - DNA, 21 bp, Artificial Sequence
  Description of Artificial Sequence: Synthetic oligonucleotide
gtctacagagacagcacacca

SEQ ID NO: 42243 - DNA, 21 bp, Artificial Sequence
  Description of Artificial Sequence: Synthetic oligonucleotide
gtctacagaagccacgaaaca

SEQ ID NO: 42244 - DNA, 21 bp, Artificial Sequence
  Description of Artificial Sequence: Synthetic oligonucleotide
gtctacagcctcggaggactc

SEQ ID NO: 42245 - DNA, 21 bp, Artificial Sequence
  Description of Artificial Sequence: Synthetic oligonucleotide
gtctacagcaacatgacagga

SEQ ID NO: 42246 - DNA, 21 bp, Artificial Sequence
  Description of Artificial Sequence: Synthetic oligonucleotide
gtctacagccaaggagcaaga

SEQ ID NO: 42247 - DNA, 21 bp, Artificial Sequence
  Description of Artificial Sequence: Synthetic oligonucleotide
gtctacacagcagcaagagca

SEQ ID NO: 42248 - DNA, 21 bp, Artificial Sequence
  Description of Artificial Sequence: Synthetic oligonucleotide
gtctacacacaaaacagccca

SEQ ID NO: 42249 - DNA, 21 bp, Artificial Sequence
  Description of Artificial Sequence: Synthetic oligonucleotide
gtctacacaagcagcatgcac

SEQ ID NO: 42250 - DNA, 21 bp, Artificial Sequence
  Description of Artificial Sequence: Synthetic oligonucleotide
gtctactacggaaaagaacca

SEQ ID NO: 42251 - DNA, 21 bp, Artificial Sequence
  Description of Artificial Sequence: Synthetic oligonucleotide
tgggcagacaaaagccaccca

SEQ ID NO: 42252 - DNA, 21 bp, Artificial Sequence
  Description of Artificial Sequence: Synthetic oligonucleotide
tgggcagacaacagcgtcaac

SEQ ID NO: 42253 - DNA, 21 bp, Artificial Sequence
  Description of Artificial Sequence: Synthetic oligonucleotide
tgggcagacacaacaacaaga

SEQ ID NO: 42254 - DNA, 21 bp, Artificial Sequence
  Description of Artificial Sequence: Synthetic oligonucleotide
tgggcaggagcaatgccaatg

SEQ ID NO: 42255 - DNA, 21 bp, Artificial Sequence
  Description of Artificial Sequence: Synthetic oligonucleotide
tgggcacacaaaggactccca

SEQ ID NO: 42256 - DNA, 21 bp, Artificial Sequence
  Description of Artificial Sequence: Synthetic oligonucleotide
tgggcaaaaagccaactcgca

SEQ ID NO: 42257 - DNA, 21 bp, Artificial Sequence
  Description of Artificial Sequence: Synthetic oligonucleotide
tgggcaccaagaagcccagga

SEQ ID NO: 42258 - DNA, 21 bp, Artificial Sequence
  Description of Artificial Sequence: Synthetic oligonucleotide
tgggcaagcgcagaaagacaa

SEQ ID NO: 42259 - DNA, 21 bp, Artificial Sequence
  Description of Artificial Sequence: Synthetic oligonucleotide
tgggcaagcggacaccaagca

SEQ ID NO: 42260 - DNA, 21 bp, Artificial Sequence
  Description of Artificial Sequence: Synthetic oligonucleotide
tgggcaagcccaatcagagga

SEQ ID NO: 42261 - DNA, 21 bp, Artificial Sequence
  Description of Artificial Sequence: Synthetic oligonucleotide
tgggcaacagaactcagagga

SEQ ID NO: 42262 - DNA, 21 bp, Artificial Sequence
  Description of Artificial Sequence: Synthetic oligonucleotide
tgggcaacaggaagcagccca

SEQ ID NO: 42263 - DNA, 21 bp, Artificial Sequence
  Description of Artificial Sequence: Synthetic oligonucleotide
tggtgccaaagaccaggagca

SEQ ID NO: 42264 - DNA, 21 bp, Artificial Sequence
  Description of Artificial Sequence: Synthetic oligonucleotide
tgggacgcagcagtcacactc

SEQ ID NO: 42265 - DNA, 21 bp, Artificial Sequence
  Description of Artificial Sequence: Synthetic oligonucleotide
tgggacgcattcagcacagac

SEQ ID NO: 42266 - DNA, 21 bp, Artificial Sequence
  Description of Artificial Sequence: Synthetic oligonucleotide
tgggacgcactcgaaccagtc

SEQ ID NO: 42267 - DNA, 21 bp, Artificial Sequence
  Description of Artificial Sequence: Synthetic oligonucleotide
tgggacgcaatgacagcacca

SEQ ID NO: 42268 - DNA, 21 bp, Artificial Sequence
  Description of Artificial Sequence: Synthetic oligonucleotide
tgggacgcaacagcaccaaca

SEQ ID NO: 42269 - DNA, 21 bp, Artificial Sequence
  Description of Artificial Sequence: Synthetic oligonucleotide
tgggacgacggaggaacacca

SEQ ID NO: 42270 - DNA, 21 bp, Artificial Sequence
  Description of Artificial Sequence: Synthetic oligonucleotide
tgggacatcacaaaaacattc

SEQ ID NO: 42271 - DNA, 21 bp, Artificial Sequence
  Description of Artificial Sequence: Synthetic oligonucleotide
tgggacaaaaaaccaacaatc

SEQ ID NO: 42272 - DNA, 21 bp, Artificial Sequence
  Description of Artificial Sequence: Synthetic oligonucleotide
tgggacccagcatacggaagc

SEQ ID NO: 42273 - DNA, 21 bp, Artificial Sequence
  Description of Artificial Sequence: Synthetic oligonucleotide
tgggacccaagaaacagccaa

SEQ ID NO: 42274 - DNA, 21 bp, Artificial Sequence
  Description of Artificial Sequence: Synthetic oligonucleotide
tgggacccaagcagaacaaca

SEQ ID NO: 42275 - DNA, 21 bp, Artificial Sequence
  Description of Artificial Sequence: Synthetic oligonucleotide
tgggaccaactcgaaagagca

SEQ ID NO: 42276 - DNA, 21 bp, Artificial Sequence
  Description of Artificial Sequence: Synthetic oligonucleotide
tgggaccaaccacaccaagca

SEQ ID NO: 42277 - DNA, 21 bp, Artificial Sequence
  Description of Artificial Sequence: Synthetic oligonucleotide
tgggacagagacgcagcactc

SEQ ID NO: 42278 - DNA, 21 bp, Artificial Sequence
  Description of Artificial Sequence: Synthetic oligonucleotide
tgggacagcggaagcctcgga

SEQ ID NO: 42279 - DNA, 21 bp, Artificial Sequence
  Description of Artificial Sequence: Synthetic oligonucleotide
tgggacagcagacaccacgtc

SEQ ID NO: 42280 - DNA, 21 bp, Artificial Sequence
  Description of Artificial Sequence: Synthetic oligonucleotide
tgggacacaccaggacaaagc

SEQ ID NO: 42281 - DNA, 21 bp, Artificial Sequence
  Description of Artificial Sequence: Synthetic oligonucleotide
tgggacacacaattcagcagc

SEQ ID NO: 42282 - DNA, 21 bp, Artificial Sequence
  Description of Artificial Sequence: Synthetic oligonucleotide
tgggaagcacactggacacca

SEQ ID NO: 42283 - DNA, 21 bp, Artificial Sequence
  Description of Artificial Sequence: Synthetic oligonucleotide
tgggaaggagcaaacccagtc

SEQ ID NO: 42284 - DNA, 21 bp, Artificial Sequence
  Description of Artificial Sequence: Synthetic oligonucleotide
tgggaaggaagccacccatac

SEQ ID NO: 42285 - DNA, 21 bp, Artificial Sequence
  Description of Artificial Sequence: Synthetic oligonucleotide
tgggaaggaagcaaagacttc

SEQ ID NO: 42286 - DNA, 21 bp, Artificial Sequence
  Description of Artificial Sequence: Synthetic oligonucleotide
tgggaaatgacaagagtcgac

SEQ ID NO: 42287 - DNA, 21 bp, Artificial Sequence
  Description of Artificial Sequence: Synthetic oligonucleotide
tgggaaagaagcagaagcgca

SEQ ID NO: 42288 - DNA, 21 bp, Artificial Sequence
  Description of Artificial Sequence: Synthetic oligonucleotide
tgggaaagcggaggaggattc

SEQ ID NO: 42289 - DNA, 21 bp, Artificial Sequence
  Description of Artificial Sequence: Synthetic oligonucleotide
tggttcgaagacagactcgac

SEQ ID NO: 42290 - DNA, 21 bp, Artificial Sequence
  Description of Artificial Sequence: Synthetic oligonucleotide
tggttcgaaaaatgcaaagac

SEQ ID NO: 42291 - DNA, 21 bp, Artificial Sequence
  Description of Artificial Sequence: Synthetic oligonucleotide
tggttcccaagcggacacgca

SEQ ID NO: 42292 - DNA, 21 bp, Artificial Sequence
  Description of Artificial Sequence: Synthetic oligonucleotide
tggggagcagcactcacacca

SEQ ID NO: 42293 - DNA, 21 bp, Artificial Sequence
  Description of Artificial Sequence: Synthetic oligonucleotide
tggggagcaagactcgacagc

SEQ ID NO: 42294 - DNA, 21 bp, Artificial Sequence
  Description of Artificial Sequence: Synthetic oligonucleotide
tggggagcaagccaaacaagc

SEQ ID NO: 42295 - DNA, 21 bp, Artificial Sequence
  Description of Artificial Sequence: Synthetic oligonucleotide
tggggaggaacaagcccagga

SEQ ID NO: 42296 - DNA, 21 bp, Artificial Sequence
  Description of Artificial Sequence: Synthetic oligonucleotide
tggggacacaacaacagccca

SEQ ID NO: 42297 - DNA, 21 bp, Artificial Sequence
  Description of Artificial Sequence: Synthetic oligonucleotide
tggggacacagcagcggagtc

SEQ ID NO: 42298 - DNA, 21 bp, Artificial Sequence
  Description of Artificial Sequence: Synthetic oligonucleotide
tggggactcctccacagcgca

SEQ ID NO: 42299 - DNA, 21 bp, Artificial Sequence
  Description of Artificial Sequence: Synthetic oligonucleotide
tggggactcgtcacaagccca

SEQ ID NO: 42300 - DNA, 21 bp, Artificial Sequence
  Description of Artificial Sequence: Synthetic oligonucleotide
tggggaaaccaacaaccaaga

SEQ ID NO: 42301 - DNA, 21 bp, Artificial Sequence
  Description of Artificial Sequence: Synthetic oligonucleotide
tggggaaacagccacaacaca

SEQ ID NO: 42302 - DNA, 21 bp, Artificial Sequence
  Description of Artificial Sequence: Synthetic oligonucleotide
tggggaccaacaacaagccac

SEQ ID NO: 42303 - DNA, 21 bp, Artificial Sequence
  Description of Artificial Sequence: Synthetic oligonucleotide
tggggaagcggagcagcagga

SEQ ID NO: 42304 - DNA, 21 bp, Artificial Sequence
  Description of Artificial Sequence: Synthetic oligonucleotide
tggggaagcggagcagaaaca

SEQ ID NO: 42305 - DNA, 21 bp, Artificial Sequence
  Description of Artificial Sequence: Synthetic oligonucleotide
tggggaagcagcggacaagga

SEQ ID NO: 42306 - DNA, 21 bp, Artificial Sequence
  Description of Artificial Sequence: Synthetic oligonucleotide
tggggaacacaactcgcaatg

SEQ ID NO: 42307 - DNA, 21 bp, Artificial Sequence
  Description of Artificial Sequence: Synthetic oligonucleotide
tggggaacaagcgacaaaagc

SEQ ID NO: 42308 - DNA, 21 bp, Artificial Sequence
  Description of Artificial Sequence: Synthetic oligonucleotide
tggggatacctccacgtcgca

SEQ ID NO: 42309 - DNA, 21 bp, Artificial Sequence
  Description of Artificial Sequence: Synthetic oligonucleotide
tggcacggaacaggactcatc

SEQ ID NO: 42310 - DNA, 21 bp, Artificial Sequence
  Description of Artificial Sequence: Synthetic oligonucleotide
tggcacaaaagcagcagcagc

SEQ ID NO: 42311 - DNA, 21 bp, Artificial Sequence
  Description of Artificial Sequence: Synthetic oligonucleotide
tggcacccaagcggaagcaga

SEQ ID NO: 42312 - DNA, 21 bp, Artificial Sequence
  Description of Artificial Sequence: Synthetic oligonucleotide
tggcacagaacagcacaagac

SEQ ID NO: 42313 - DNA, 21 bp, Artificial Sequence
  Description of Artificial Sequence: Synthetic oligonucleotide
tggcacagcgcaaaactcgca

SEQ ID NO: 42314 - DNA, 21 bp, Artificial Sequence
  Description of Artificial Sequence: Synthetic oligonucleotide
tggcacagcctcatggaacca

SEQ ID NO: 42315 - DNA, 21 bp, Artificial Sequence
  Description of Artificial Sequence: Synthetic oligonucleotide
tggcacagcagaatgtacgaa

SEQ ID NO: 42316 - DNA, 21 bp, Artificial Sequence
  Description of Artificial Sequence: Synthetic oligonucleotide
tggcacagcagcgcaacacaa

SEQ ID NO: 42317 - DNA, 21 bp, Artificial Sequence
  Description of Artificial Sequence: Synthetic oligonucleotide
tggcacagcagcgacctcgtc

SEQ ID NO: 42318 - DNA, 21 bp, Artificial Sequence
  Description of Artificial Sequence: Synthetic oligonucleotide
tggatcggaaacggaggacca

SEQ ID NO: 42319 - DNA, 21 bp, Artificial Sequence
  Description of Artificial Sequence: Synthetic oligonucleotide
tggatcggacaaaacacagtc

SEQ ID NO: 42320 - DNA, 21 bp, Artificial Sequence
  Description of Artificial Sequence: Synthetic oligonucleotide
tggatcaaagaagcaagcagc

SEQ ID NO: 42321 - DNA, 21 bp, Artificial Sequence
  Description of Artificial Sequence: Synthetic oligonucleotide
tggatcccaggagcaccaagc

SEQ ID NO: 42322 - DNA, 21 bp, Artificial Sequence
  Description of Artificial Sequence: Synthetic oligonucleotide
tggatcccacaacaagacgtc

SEQ ID NO: 42323 - DNA, 21 bp, Artificial Sequence
  Description of Artificial Sequence: Synthetic oligonucleotide
tggatcccaagcggactcagc

SEQ ID NO: 42324 - DNA, 21 bp, Artificial Sequence
  Description of Artificial Sequence: Synthetic oligonucleotide
tggatcacaacagaaccactc

SEQ ID NO: 42325 - DNA, 21 bp, Artificial Sequence
  Description of Artificial Sequence: Synthetic oligonucleotide
tggaaagcaaacctcccaagc

SEQ ID NO: 42326 - DNA, 21 bp, Artificial Sequence
  Description of Artificial Sequence: Synthetic oligonucleotide
tggaaagacgaatgccaaaca

SEQ ID NO: 42327 - DNA, 21 bp, Artificial Sequence
  Description of Artificial Sequence: Synthetic oligonucleotide
tggaaagacagccactacgaa

SEQ ID NO: 42328 - DNA, 21 bp, Artificial Sequence
  Description of Artificial Sequence: Synthetic oligonucleotide
tggaaagaacacggagcagca

SEQ ID NO: 42329 - DNA, 21 bp, Artificial Sequence
  Description of Artificial Sequence: Synthetic oligonucleotide
tggaaacacagcacacaaagc

SEQ ID NO: 42330 - DNA, 21 bp, Artificial Sequence
  Description of Artificial Sequence: Synthetic oligonucleotide
tggaaaatcatgatcgcagaa

SEQ ID NO: 42331 - DNA, 21 bp, Artificial Sequence
  Description of Artificial Sequence: Synthetic oligonucleotide
tggaaaaaaaacatggacttc

SEQ ID NO: 42332 - DNA, 21 bp, Artificial Sequence
  Description of Artificial Sequence: Synthetic oligonucleotide
tggaaactcaacagagaccaa

SEQ ID NO: 42333 - DNA, 21 bp, Artificial Sequence
  Description of Artificial Sequence: Synthetic oligonucleotide
tggaaaaacacaagctgcgga

SEQ ID NO: 42334 - DNA, 21 bp, Artificial Sequence
  Description of Artificial Sequence: Synthetic oligonucleotide
tggaaaccagcagtcccacaa

SEQ ID NO: 42335 - DNA, 21 bp, Artificial Sequence
  Description of Artificial Sequence: Synthetic oligonucleotide
tggaaaccagaaatcctccca

SEQ ID NO: 42336 - DNA, 21 bp, Artificial Sequence
  Description of Artificial Sequence: Synthetic oligonucleotide
tggaaaccaccactcaaccca

SEQ ID NO: 42337 - DNA, 21 bp, Artificial Sequence
  Description of Artificial Sequence: Synthetic oligonucleotide
tggaaacaaggaagcacagga

SEQ ID NO: 42338 - DNA, 21 bp, Artificial Sequence
  Description of Artificial Sequence: Synthetic oligonucleotide
tggaaaagcgacagcgcaagc

SEQ ID NO: 42339 - DNA, 21 bp, Artificial Sequence
  Description of Artificial Sequence: Synthetic oligonucleotide
tggaaaagcaacacactcaca

SEQ ID NO: 42340 - DNA, 21 bp, Artificial Sequence
  Description of Artificial Sequence: Synthetic oligonucleotide
tggaaaagccaaatcccactc

SEQ ID NO: 42341 - DNA, 21 bp, Artificial Sequence
  Description of Artificial Sequence: Synthetic oligonucleotide
tggaaaagccaactcccaaac

SEQ ID NO: 42342 - DNA, 21 bp, Artificial Sequence
  Description of Artificial Sequence: Synthetic oligonucleotide
tggaaaagccaaatgaaccca

SEQ ID NO: 42343 - DNA, 21 bp, Artificial Sequence
  Description of Artificial Sequence: Synthetic oligonucleotide
tggaaaagcacagacctcaca

SEQ ID NO: 42344 - DNA, 21 bp, Artificial Sequence
  Description of Artificial Sequence: Synthetic oligonucleotide
tggaaagtcagcacagacaca

SEQ ID NO: 42345 - DNA, 21 bp, Artificial Sequence
  Description of Artificial Sequence: Synthetic oligonucleotide
tggctcgcagacccaagcgac

SEQ ID NO: 42346 - DNA, 21 bp, Artificial Sequence
  Description of Artificial Sequence: Synthetic oligonucleotide
tggctcgaaaacagccaaagc

SEQ ID NO: 42347 - DNA, 21 bp, Artificial Sequence
  Description of Artificial Sequence: Synthetic oligonucleotide
tggctcgaaagcggaacagga

SEQ ID NO: 42348 - DNA, 21 bp, Artificial Sequence
  Description of Artificial Sequence: Synthetic oligonucleotide
tggctcggaagagcagacgca

SEQ ID NO: 42349 - DNA, 21 bp, Artificial Sequence
  Description of Artificial Sequence: Synthetic oligonucleotide
tggctccacgacacaacaagc

SEQ ID NO: 42350 - DNA, 21 bp, Artificial Sequence
  Description of Artificial Sequence: Synthetic oligonucleotide
tggctccacgaacaaccaaac

SEQ ID NO: 42351 - DNA, 21 bp, Artificial Sequence
  Description of Artificial Sequence: Synthetic oligonucleotide
tggctccacagaagcaacgca

SEQ ID NO: 42352 - DNA, 21 bp, Artificial Sequence
  Description of Artificial Sequence: Synthetic oligonucleotide
tggctcaaacaaacagacaac

SEQ ID NO: 42353 - DNA, 21 bp, Artificial Sequence
  Description of Artificial Sequence: Synthetic oligonucleotide
tggctcctcaaccaagaagaa

SEQ ID NO: 42354 - DNA, 21 bp, Artificial Sequence
  Description of Artificial Sequence: Synthetic oligonucleotide
tggctcaacgacagcagcaga

SEQ ID NO: 42355 - DNA, 21 bp, Artificial Sequence
  Description of Artificial Sequence: Synthetic oligonucleotide
tggctcccaaaactcccacac

SEQ ID NO: 42356 - DNA, 21 bp, Artificial Sequence
  Description of Artificial Sequence: Synthetic oligonucleotide
tggctcccaacacaaacagaa

SEQ ID NO: 42357 - DNA, 21 bp, Artificial Sequence
  Description of Artificial Sequence: Synthetic oligonucleotide
tggctcagaacaccagacgca

SEQ ID NO: 42358 - DNA, 21 bp, Artificial Sequence
  Description of Artificial Sequence: Synthetic oligonucleotide
tggctcacaagcctcaaaatg

SEQ ID NO: 42359 - DNA, 21 bp, Artificial Sequence
  Description of Artificial Sequence: Synthetic oligonucleotide
tggctcacaagcccaaacgtc

SEQ ID NO: 42360 - DNA, 21 bp, Artificial Sequence
  Description of Artificial Sequence: Synthetic oligonucleotide
tggatggcaatgagacaagac

SEQ ID NO: 42361 - DNA, 21 bp, Artificial Sequence
  Description of Artificial Sequence: Synthetic oligonucleotide
tggatgctccaagaaacaagc

SEQ ID NO: 42362 - DNA, 21 bp, Artificial Sequence
  Description of Artificial Sequence: Synthetic oligonucleotide
tggatgatggaaagcagacca

SEQ ID NO: 42363 - DNA, 21 bp, Artificial Sequence
  Description of Artificial Sequence: Synthetic oligonucleotide
tggatgcaaagcgcaaacaga

SEQ ID NO: 42364 - DNA, 21 bp, Artificial Sequence
  Description of Artificial Sequence: Synthetic oligonucleotide
tggatgagcagactcccagca

SEQ ID NO: 42365 - DNA, 21 bp, Artificial Sequence
  Description of Artificial Sequence: Synthetic oligonucleotide
tggaacgacgtcacagcaaga

SEQ ID NO: 42366 - DNA, 21 bp, Artificial Sequence
  Description of Artificial Sequence: Synthetic oligonucleotide
tggaacaaaagcctcctcagc

SEQ ID NO: 42367 - DNA, 21 bp, Artificial Sequence
  Description of Artificial Sequence: Synthetic oligonucleotide
tggaacaaaacagaactcgac

SEQ ID NO: 42368 - DNA, 21 bp, Artificial Sequence
  Description of Artificial Sequence: Synthetic oligonucleotide
tggaacctcgaaagcacaaca

SEQ ID NO: 42369 - DNA, 21 bp, Artificial Sequence
  Description of Artificial Sequence: Synthetic oligonucleotide
tggaacaacccagaccaactc

SEQ ID NO: 42370 - DNA, 21 bp, Artificial Sequence
  Description of Artificial Sequence: Synthetic oligonucleotide
tggaacccaccactcccagca

SEQ ID NO: 42371 - DNA, 21 bp, Artificial Sequence
  Description of Artificial Sequence: Synthetic oligonucleotide
tggaacccaagaagcagcgaa

SEQ ID NO: 42372 - DNA, 21 bp, Artificial Sequence
  Description of Artificial Sequence: Synthetic oligonucleotide
tggaacacacaacaaggagtc

SEQ ID NO: 42373 - DNA, 21 bp, Artificial Sequence
  Description of Artificial Sequence: Synthetic oligonucleotide
tggaacacaacactcccaatc

SEQ ID NO: 42374 - DNA, 21 bp, Artificial Sequence
  Description of Artificial Sequence: Synthetic oligonucleotide
tggaacacagtcacaatcaga

SEQ ID NO: 42375 - DNA, 21 bp, Artificial Sequence
  Description of Artificial Sequence: Synthetic oligonucleotide
tggccagcaaaaacagtcgaa

SEQ ID NO: 42376 - DNA, 21 bp, Artificial Sequence
  Description of Artificial Sequence: Synthetic oligonucleotide
tggccagcacaagtcagcagc

SEQ ID NO: 42377 - DNA, 21 bp, Artificial Sequence
  Description of Artificial Sequence: Synthetic oligonucleotide
tggccagcaagcgtcacagac

SEQ ID NO: 42378 - DNA, 21 bp, Artificial Sequence
  Description of Artificial Sequence: Synthetic oligonucleotide
tggccagaaaaaagactcaca

SEQ ID NO: 42379 - DNA, 21 bp, Artificial Sequence
  Description of Artificial Sequence: Synthetic oligonucleotide
tggccagaaagctacagcaca

SEQ ID NO: 42380 - DNA, 21 bp, Artificial Sequence
  Description of Artificial Sequence: Synthetic oligonucleotide
tggccaggaatgagcgcagga

SEQ ID NO: 42381 - DNA, 21 bp, Artificial Sequence
  Description of Artificial Sequence: Synthetic oligonucleotide
tggccaggaagcagccacgtc

SEQ ID NO: 42382 - DNA, 21 bp, Artificial Sequence
  Description of Artificial Sequence: Synthetic oligonucleotide
tggccaaacctcgtcagcgga

SEQ ID NO: 42383 - DNA, 21 bp, Artificial Sequence
  Description of Artificial Sequence: Synthetic oligonucleotide
tggccaccagcaagcacactc

SEQ ID NO: 42384 - DNA, 21 bp, Artificial Sequence
  Description of Artificial Sequence: Synthetic oligonucleotide
tggccaccagcagtcagcagc

SEQ ID NO: 42385 - DNA, 21 bp, Artificial Sequence
  Description of Artificial Sequence: Synthetic oligonucleotide
tggccaccaagcgtcaacgga

SEQ ID NO: 42386 - DNA, 21 bp, Artificial Sequence
  Description of Artificial Sequence: Synthetic oligonucleotide
tggccacaaagcagcagcgga

SEQ ID NO: 42387 - DNA, 21 bp, Artificial Sequence
  Description of Artificial Sequence: Synthetic oligonucleotide
tggccaagcatggacggaagc

SEQ ID NO: 42388 - DNA, 21 bp, Artificial Sequence
  Description of Artificial Sequence: Synthetic oligonucleotide
tggccaagcagcatccaaatc

SEQ ID NO: 42389 - DNA, 21 bp, Artificial Sequence
  Description of Artificial Sequence: Synthetic oligonucleotide
tggccaagcagcacactcagc

SEQ ID NO: 42390 - DNA, 21 bp, Artificial Sequence
  Description of Artificial Sequence: Synthetic oligonucleotide
tggccaacaatcatcaacaga

SEQ ID NO: 42391 - DNA, 21 bp, Artificial Sequence
  Description of Artificial Sequence: Synthetic oligonucleotide
tggccaacaaaaagcacacca

SEQ ID NO: 42392 - DNA, 21 bp, Artificial Sequence
  Description of Artificial Sequence: Synthetic oligonucleotide
tggccaacaaacagcagacca

SEQ ID NO: 42393 - DNA, 21 bp, Artificial Sequence
  Description of Artificial Sequence: Synthetic oligonucleotide
tggccaacaaacacaatccca

SEQ ID NO: 42394 - DNA, 21 bp, Artificial Sequence
  Description of Artificial Sequence: Synthetic oligonucleotide
tggccagtccaccacgcagca

SEQ ID NO: 42395 - DNA, 21 bp, Artificial Sequence
  Description of Artificial Sequence: Synthetic oligonucleotide
tggccagtcacaagctacgga

SEQ ID NO: 42396 - DNA, 21 bp, Artificial Sequence
  Description of Artificial Sequence: Synthetic oligonucleotide
tggccatacgacccaggaaga

SEQ ID NO: 42397 - DNA, 21 bp, Artificial Sequence
  Description of Artificial Sequence: Synthetic oligonucleotide
tggcaaggactcacacaagga

SEQ ID NO: 42398 - DNA, 21 bp, Artificial Sequence
  Description of Artificial Sequence: Synthetic oligonucleotide
tggcaactcgcaacacaacca

SEQ ID NO: 42399 - DNA, 21 bp, Artificial Sequence
  Description of Artificial Sequence: Synthetic oligonucleotide
tggcaaatgctcctcagcgaa

SEQ ID NO: 42400 - DNA, 21 bp, Artificial Sequence
  Description of Artificial Sequence: Synthetic oligonucleotide
tggcaacaactcagcgcaagc

SEQ ID NO: 42401 - DNA, 21 bp, Artificial Sequence
  Description of Artificial Sequence: Synthetic oligonucleotide
tggcaaagaagcggagacgtc

SEQ ID NO: 42402 - DNA, 21 bp, Artificial Sequence
  Description of Artificial Sequence: Synthetic oligonucleotide
tggcaaagccaagcaacaatg

SEQ ID NO: 42403 - DNA, 21 bp, Artificial Sequence
  Description of Artificial Sequence: Synthetic oligonucleotide
tggcaaacacaaagcagaagc

SEQ ID NO: 42404 - DNA, 21 bp, Artificial Sequence
  Description of Artificial Sequence: Synthetic oligonucleotide
tggcaatacagccacgaacca

SEQ ID NO: 42405 - DNA, 21 bp, Artificial Sequence
  Description of Artificial Sequence: Synthetic oligonucleotide
tggagagcaatgctcgaagaa

SEQ ID NO: 42406 - DNA, 21 bp, Artificial Sequence
  Description of Artificial Sequence: Synthetic oligonucleotide
tggagagcaccaggaagcgca

SEQ ID NO: 42407 - DNA, 21 bp, Artificial Sequence
  Description of Artificial Sequence: Synthetic oligonucleotide
tggagagacgcaacatgctgc

SEQ ID NO: 42408 - DNA, 21 bp, Artificial Sequence
  Description of Artificial Sequence: Synthetic oligonucleotide
tggagagaaagatacgcagca

SEQ ID NO: 42409 - DNA, 21 bp, Artificial Sequence
  Description of Artificial Sequence: Synthetic oligonucleotide
tggagaggactcgacatcgaa

SEQ ID NO: 42410 - DNA, 21 bp, Artificial Sequence
  Description of Artificial Sequence: Synthetic oligonucleotide
tggagacacgactacaacctc

SEQ ID NO: 42411 - DNA, 21 bp, Artificial Sequence
  Description of Artificial Sequence: Synthetic oligonucleotide
tggagacacacagaagcaatc

SEQ ID NO: 42412 - DNA, 21 bp, Artificial Sequence
  Description of Artificial Sequence: Synthetic oligonucleotide
tggagaatcacagcagaaagc

SEQ ID NO: 42413 - DNA, 21 bp, Artificial Sequence
  Description of Artificial Sequence: Synthetic oligonucleotide
tggagaccactcgtcgaaaca

SEQ ID NO: 42414 - DNA, 21 bp, Artificial Sequence
  Description of Artificial Sequence: Synthetic oligonucleotide
tggagaccaaacatggcagca

SEQ ID NO: 42415 - DNA, 21 bp, Artificial Sequence
  Description of Artificial Sequence: Synthetic oligonucleotide
tggagaccaaacatgagcgtc

SEQ ID NO: 42416 - DNA, 21 bp, Artificial Sequence
  Description of Artificial Sequence: Synthetic oligonucleotide
tggagaccacaaagaccagtc

SEQ ID NO: 42417 - DNA, 21 bp, Artificial Sequence
  Description of Artificial Sequence: Synthetic oligonucleotide
tggagacaagaaacaagcgtc

SEQ ID NO: 42418 - DNA, 21 bp, Artificial Sequence
  Description of Artificial Sequence: Synthetic oligonucleotide
tggagaagagacgcaagccca

SEQ ID NO: 42419 - DNA, 21 bp, Artificial Sequence
  Description of Artificial Sequence: Synthetic oligonucleotide
tggagaagcgcaagcagcgca

SEQ ID NO: 42420 - DNA, 21 bp, Artificial Sequence
  Description of Artificial Sequence: Synthetic oligonucleotide
tggagaagcagagaaatcgca

SEQ ID NO: 42421 - DNA, 21 bp, Artificial Sequence
  Description of Artificial Sequence: Synthetic oligonucleotide
tggagaagcagcgcagaagca

SEQ ID NO: 42422 - DNA, 21 bp, Artificial Sequence
  Description of Artificial Sequence: Synthetic oligonucleotide
tggagcgcagacccagacaca

SEQ ID NO: 42423 - DNA, 21 bp, Artificial Sequence
  Description of Artificial Sequence: Synthetic oligonucleotide
tggagcgcaagcagccaccaa

SEQ ID NO: 42424 - DNA, 21 bp, Artificial Sequence
  Description of Artificial Sequence: Synthetic oligonucleotide
tggagcgcagtcggagaagtc

SEQ ID NO: 42425 - DNA, 21 bp, Artificial Sequence
  Description of Artificial Sequence: Synthetic oligonucleotide
tggagcgacagcacagcagtc

SEQ ID NO: 42426 - DNA, 21 bp, Artificial Sequence
  Description of Artificial Sequence: Synthetic oligonucleotide
tggagcggacacccagtcgca

SEQ ID NO: 42427 - DNA, 21 bp, Artificial Sequence
  Description of Artificial Sequence: Synthetic oligonucleotide
tggagcggaaaagcaaacgca

SEQ ID NO: 42428 - DNA, 21 bp, Artificial Sequence
  Description of Artificial Sequence: Synthetic oligonucleotide
tggagcggaccaatcagcctc

SEQ ID NO: 42429 - DNA, 21 bp, Artificial Sequence
  Description of Artificial Sequence: Synthetic oligonucleotide
tggagccacggaccaatgcca

SEQ ID NO: 42430 - DNA, 21 bp, Artificial Sequence
  Description of Artificial Sequence: Synthetic oligonucleotide
tggagccacggaagcacaaca

SEQ ID NO: 42431 - DNA, 21 bp, Artificial Sequence
  Description of Artificial Sequence: Synthetic oligonucleotide
tggagcaaagtcccagacaga

SEQ ID NO: 42432 - DNA, 21 bp, Artificial Sequence
  Description of Artificial Sequence: Synthetic oligonucleotide
tggagcctcgtccacagagaa

SEQ ID NO: 42433 - DNA, 21 bp, Artificial Sequence
  Description of Artificial Sequence: Synthetic oligonucleotide
tggagcaaccacgcacacgca

SEQ ID NO: 42434 - DNA, 21 bp, Artificial Sequence
  Description of Artificial Sequence: Synthetic oligonucleotide
tggagcccagcaagagaaaca

SEQ ID NO: 42435 - DNA, 21 bp, Artificial Sequence
  Description of Artificial Sequence: Synthetic oligonucleotide
tggagcccactctaccacgca

SEQ ID NO: 42436 - DNA, 21 bp, Artificial Sequence
  Description of Artificial Sequence: Synthetic oligonucleotide
tggagcccaaacagcacacca

SEQ ID NO: 42437 - DNA, 21 bp, Artificial Sequence
  Description of Artificial Sequence: Synthetic oligonucleotide
tggagcccaaacgtctgccca

SEQ ID NO: 42438 - DNA, 21 bp, Artificial Sequence
  Description of Artificial Sequence: Synthetic oligonucleotide
tggagcccaagaaacacactc

SEQ ID NO: 42439 - DNA, 21 bp, Artificial Sequence
  Description of Artificial Sequence: Synthetic oligonucleotide
tggagcccaagcgaaggaaaa

SEQ ID NO: 42440 - DNA, 21 bp, Artificial Sequence
  Description of Artificial Sequence: Synthetic oligonucleotide
tggagcccaagccaagcatac

SEQ ID NO: 42441 - DNA, 21 bp, Artificial Sequence
  Description of Artificial Sequence: Synthetic oligonucleotide
tggagcccagtcgtcgtcaga

SEQ ID NO: 42442 - DNA, 21 bp, Artificial Sequence
  Description of Artificial Sequence: Synthetic oligonucleotide
tggagcagagcagcagtcgac

SEQ ID NO: 42443 - DNA, 21 bp, Artificial Sequence
  Description of Artificial Sequence: Synthetic oligonucleotide
tggagcagaccagcagcagac

SEQ ID NO: 42444 - DNA, 21 bp, Artificial Sequence
  Description of Artificial Sequence: Synthetic oligonucleotide
tggagcagacaagacctccca

SEQ ID NO: 42445 - DNA, 21 bp, Artificial Sequence
  Description of Artificial Sequence: Synthetic oligonucleotide
tggagcagcgcatacgtcagc

SEQ ID NO: 42446 - DNA, 21 bp, Artificial Sequence
  Description of Artificial Sequence: Synthetic oligonucleotide
tggagcagcgacgcaccagaa

SEQ ID NO: 42447 - DNA, 21 bp, Artificial Sequence
  Description of Artificial Sequence: Synthetic oligonucleotide
tggagcagcatgagcatgcac

SEQ ID NO: 42448 - DNA, 21 bp, Artificial Sequence
  Description of Artificial Sequence: Synthetic oligonucleotide
tggagcacaaaactcgaagga

SEQ ID NO: 42449 - DNA, 21 bp, Artificial Sequence
  Description of Artificial Sequence: Synthetic oligonucleotide
tggagcacaaacgcataccaa

SEQ ID NO: 42450 - DNA, 21 bp, Artificial Sequence
  Description of Artificial Sequence: Synthetic oligonucleotide
tggagcacaagcacactccac

SEQ ID NO: 42451 - DNA, 21 bp, Artificial Sequence
  Description of Artificial Sequence: Synthetic oligonucleotide
tggacagcaccaagcgacgtc

SEQ ID NO: 42452 - DNA, 21 bp, Artificial Sequence
  Description of Artificial Sequence: Synthetic oligonucleotide
tggacagcacaaaacgtccaa

SEQ ID NO: 42453 - DNA, 21 bp, Artificial Sequence
  Description of Artificial Sequence: Synthetic oligonucleotide
tggacagcaagcagagcaagc

SEQ ID NO: 42454 - DNA, 21 bp, Artificial Sequence
  Description of Artificial Sequence: Synthetic oligonucleotide
tggacagaaagagtcggaaca

SEQ ID NO: 42455 - DNA, 21 bp, Artificial Sequence
  Description of Artificial Sequence: Synthetic oligonucleotide
tggacaggaagcgcacaccaa

SEQ ID NO: 42456 - DNA, 21 bp, Artificial Sequence
  Description of Artificial Sequence: Synthetic oligonucleotide
tggacaggatacagccaacaa

SEQ ID NO: 42457 - DNA, 21 bp, Artificial Sequence
  Description of Artificial Sequence: Synthetic oligonucleotide
tggacaaacagcacacaacca

SEQ ID NO: 42458 - DNA, 21 bp, Artificial Sequence
  Description of Artificial Sequence: Synthetic oligonucleotide
tggacaccacacagcccaatg

SEQ ID NO: 42459 - DNA, 21 bp, Artificial Sequence
  Description of Artificial Sequence: Synthetic oligonucleotide
tggacaccaagagtcatgcac

SEQ ID NO: 42460 - DNA, 21 bp, Artificial Sequence
  Description of Artificial Sequence: Synthetic oligonucleotide
tggacaccaagcatggcacca

SEQ ID NO: 42461 - DNA, 21 bp, Artificial Sequence
  Description of Artificial Sequence: Synthetic oligonucleotide
tggacaccaagcaacaaacac

SEQ ID NO: 42462 - DNA, 21 bp, Artificial Sequence
  Description of Artificial Sequence: Synthetic oligonucleotide
tggacaagactcgaaagcctc

SEQ ID NO: 42463 - DNA, 21 bp, Artificial Sequence
  Description of Artificial Sequence: Synthetic oligonucleotide
tggacaagcgacggaaactac

SEQ ID NO: 42464 - DNA, 21 bp, Artificial Sequence
  Description of Artificial Sequence: Synthetic oligonucleotide
tggacaagcaaaatcggacca

SEQ ID NO: 42465 - DNA, 21 bp, Artificial Sequence
  Description of Artificial Sequence: Synthetic oligonucleotide
tggacaagcagagacgcaagc

SEQ ID NO: 42466 - DNA, 21 bp, Artificial Sequence
  Description of Artificial Sequence: Synthetic oligonucleotide
tggacaagcagcggaggaagc

SEQ ID NO: 42467 - DNA, 21 bp, Artificial Sequence
  Description of Artificial Sequence: Synthetic oligonucleotide
tggacaacaaacacaggagga

SEQ ID NO: 42468 - DNA, 21 bp, Artificial Sequence
  Description of Artificial Sequence: Synthetic oligonucleotide
tggacaacaagcggaagcatc

SEQ ID NO: 42469 - DNA, 21 bp, Artificial Sequence
  Description of Artificial Sequence: Synthetic oligonucleotide
tggacagtcgacctcacacac

SEQ ID NO: 42470 - DNA, 21 bp, Artificial Sequence
  Description of Artificial Sequence: Synthetic oligonucleotide
tggacagtcgaaacaagccac

SEQ ID NO: 42471 - DNA, 21 bp, Artificial Sequence
  Description of Artificial Sequence: Synthetic oligonucleotide
tgggtccacagcagcgacagc

SEQ ID NO: 42472 - DNA, 21 bp, Artificial Sequence
  Description of Artificial Sequence: Synthetic oligonucleotide
tgggtcatccaaaactgcaac

SEQ ID NO: 42473 - DNA, 21 bp, Artificial Sequence
  Description of Artificial Sequence: Synthetic oligonucleotide
tgggtccaaagcggaacacca

SEQ ID NO: 42474 - DNA, 21 bp, Artificial Sequence
  Description of Artificial Sequence: Synthetic oligonucleotide
tgggtcacaggactcacagac

SEQ ID NO: 42475 - DNA, 21 bp, Artificial Sequence
  Description of Artificial Sequence: Synthetic oligonucleotide
tgggtcacacaacacccaagc

SEQ ID NO: 42476 - DNA, 21 bp, Artificial Sequence
  Description of Artificial Sequence: Synthetic oligonucleotide
tacgcagcagcaccaagcaga

SEQ ID NO: 42477 - DNA, 21 bp, Artificial Sequence
  Description of Artificial Sequence: Synthetic oligonucleotide
tacgcagcagcatacgcaagc

SEQ ID NO: 42478 - DNA, 21 bp, Artificial Sequence
  Description of Artificial Sequence: Synthetic oligonucleotide
tacgcagcacactacaaagaa

SEQ ID NO: 42479 - DNA, 21 bp, Artificial Sequence
  Description of Artificial Sequence: Synthetic oligonucleotide
tacgcagcaaacagacaacca

SEQ ID NO: 42480 - DNA, 21 bp, Artificial Sequence
  Description of Artificial Sequence: Synthetic oligonucleotide
tacgcagcaccaagcagcgca

SEQ ID NO: 42481 - DNA, 21 bp, Artificial Sequence
  Description of Artificial Sequence: Synthetic oligonucleotide
tacgcagcaagccacgtcagc

SEQ ID NO: 42482 - DNA, 21 bp, Artificial Sequence
  Description of Artificial Sequence: Synthetic oligonucleotide
tacgcagcaagcaacctcaca

SEQ ID NO: 42483 - DNA, 21 bp, Artificial Sequence
  Description of Artificial Sequence: Synthetic oligonucleotide
tacgcagcaagcagcgcaaca

SEQ ID NO: 42484 - DNA, 21 bp, Artificial Sequence
  Description of Artificial Sequence: Synthetic oligonucleotide
tacgcagcagtcggactcaac

SEQ ID NO: 42485 - DNA, 21 bp, Artificial Sequence
  Description of Artificial Sequence: Synthetic oligonucleotide
tacgcagcagtcagaagcaac

SEQ ID NO: 42486 - DNA, 21 bp, Artificial Sequence
  Description of Artificial Sequence: Synthetic oligonucleotide
tacgcagacctcccaagcaga

SEQ ID NO: 42487 - DNA, 21 bp, Artificial Sequence
  Description of Artificial Sequence: Synthetic oligonucleotide
tacgcagacagcgcaccatac

SEQ ID NO: 42488 - DNA, 21 bp, Artificial Sequence
  Description of Artificial Sequence: Synthetic oligonucleotide
tacgcagaaagacaaggaaga

SEQ ID NO: 42489 - DNA, 21 bp, Artificial Sequence
  Description of Artificial Sequence: Synthetic oligonucleotide
tacgcagaatacagcagaaac

SEQ ID NO: 42490 - DNA, 21 bp, Artificial Sequence
  Description of Artificial Sequence: Synthetic oligonucleotide
tacgcaggagcagcactcgga

SEQ ID NO: 42491 - DNA, 21 bp, Artificial Sequence
  Description of Artificial Sequence: Synthetic oligonucleotide
tacgcaggagcacaaagaagc

SEQ ID NO: 42492 - DNA, 21 bp, Artificial Sequence
  Description of Artificial Sequence: Synthetic oligonucleotide
tacgcaggaggaaaactcatc

SEQ ID NO: 42493 - DNA, 21 bp, Artificial Sequence
  Description of Artificial Sequence: Synthetic oligonucleotide
tacgcaggaaaagaaccagaa

SEQ ID NO: 42494 - DNA, 21 bp, Artificial Sequence
  Description of Artificial Sequence: Synthetic oligonucleotide
tacgcaggaccaaacagccca

SEQ ID NO: 42495 - DNA, 21 bp, Artificial Sequence
  Description of Artificial Sequence: Synthetic oligonucleotide
tacgcaggaagcgaagtcatg

SEQ ID NO: 42496 - DNA, 21 bp, Artificial Sequence
  Description of Artificial Sequence: Synthetic oligonucleotide
tacgcaggaagcgtcacaagc

SEQ ID NO: 42497 - DNA, 21 bp, Artificial Sequence
  Description of Artificial Sequence: Synthetic oligonucleotide
tacgcacaccaaaaaccaatg

SEQ ID NO: 42498 - DNA, 21 bp, Artificial Sequence
  Description of Artificial Sequence: Synthetic oligonucleotide
tacgcacacacaagagtcgtc

SEQ ID NO: 42499 - DNA, 21 bp, Artificial Sequence
  Description of Artificial Sequence: Synthetic oligonucleotide
tacgcaaaaccactcacaagc

SEQ ID NO: 42500 - DNA, 21 bp, Artificial Sequence
  Description of Artificial Sequence: Synthetic oligonucleotide
tacgcactcgacagcgcagaa

SEQ ID NO: 42501 - DNA, 21 bp, Artificial Sequence
  Description of Artificial Sequence: Synthetic oligonucleotide
tacgcactcgaacacagaaac

SEQ ID NO: 42502 - DNA, 21 bp, Artificial Sequence
  Description of Artificial Sequence: Synthetic oligonucleotide
tacgcactccaccaagacaaa

SEQ ID NO: 42503 - DNA, 21 bp, Artificial Sequence
  Description of Artificial Sequence: Synthetic oligonucleotide
tacgcactccaaagcaaagaa

SEQ ID NO: 42504 - DNA, 21 bp, Artificial Sequence
  Description of Artificial Sequence: Synthetic oligonucleotide
tacgcactcagcggaagcaca

SEQ ID NO: 42505 - DNA, 21 bp, Artificial Sequence
  Description of Artificial Sequence: Synthetic oligonucleotide
tacgcaaacgcaatgacactc

SEQ ID NO: 42506 - DNA, 21 bp, Artificial Sequence
  Description of Artificial Sequence: Synthetic oligonucleotide
tacgcaaacgacagcggactc

SEQ ID NO: 42507 - DNA, 21 bp, Artificial Sequence
  Description of Artificial Sequence: Synthetic oligonucleotide
tacgcaaacaacctcccacac

SEQ ID NO: 42508 - DNA, 21 bp, Artificial Sequence
  Description of Artificial Sequence: Synthetic oligonucleotide
tacgcaaacacaacaagcgca

SEQ ID NO: 42509 - DNA, 21 bp, Artificial Sequence
  Description of Artificial Sequence: Synthetic oligonucleotide
tacgcaccaggactcagaagc

SEQ ID NO: 42510 - DNA, 21 bp, Artificial Sequence
  Description of Artificial Sequence: Synthetic oligonucleotide
tacgcaccacaaagcgtcgca

SEQ ID NO: 42511 - DNA, 21 bp, Artificial Sequence
  Description of Artificial Sequence: Synthetic oligonucleotide
tacgcacaagcattcagaaac

SEQ ID NO: 42512 - DNA, 21 bp, Artificial Sequence
  Description of Artificial Sequence: Synthetic oligonucleotide
tacgcacaatacagcgcagtc

SEQ ID NO: 42513 - DNA, 21 bp, Artificial Sequence
  Description of Artificial Sequence: Synthetic oligonucleotide
tacgcaagagaagcacacgca

SEQ ID NO: 42514 - DNA, 21 bp, Artificial Sequence
  Description of Artificial Sequence: Synthetic oligonucleotide
tacgcaagagaaacactccac

SEQ ID NO: 42515 - DNA, 21 bp, Artificial Sequence
  Description of Artificial Sequence: Synthetic oligonucleotide
tacgcaagactcacaggacca

SEQ ID NO: 42516 - DNA, 21 bp, Artificial Sequence
  Description of Artificial Sequence: Synthetic oligonucleotide
tacgcaagacaaatcacagca

SEQ ID NO: 42517 - DNA, 21 bp, Artificial Sequence
  Description of Artificial Sequence: Synthetic oligonucleotide
tacgcaagacaaccagcagtc

SEQ ID NO: 42518 - DNA, 21 bp, Artificial Sequence
  Description of Artificial Sequence: Synthetic oligonucleotide
tacgcaagcgcaagccaccca

SEQ ID NO: 42519 - DNA, 21 bp, Artificial Sequence
  Description of Artificial Sequence: Synthetic oligonucleotide
tacgcaagcctcaaaggagca

SEQ ID NO: 42520 - DNA, 21 bp, Artificial Sequence
  Description of Artificial Sequence: Synthetic oligonucleotide
tacgcaagcccaggaagaaca

SEQ ID NO: 42521 - DNA, 21 bp, Artificial Sequence
  Description of Artificial Sequence: Synthetic oligonucleotide
tacgcaagcagcgcagcactc

SEQ ID NO: 42522 - DNA, 21 bp, Artificial Sequence
  Description of Artificial Sequence: Synthetic oligonucleotide
tacgcaagcagcagcacaaga

SEQ ID NO: 42523 - DNA, 21 bp, Artificial Sequence
  Description of Artificial Sequence: Synthetic oligonucleotide
tacgcaacagaaagcggaaac

SEQ ID NO: 42524 - DNA, 21 bp, Artificial Sequence
  Description of Artificial Sequence: Synthetic oligonucleotide
tacgcaacattcgcaccagca

SEQ ID NO: 42525 - DNA, 21 bp, Artificial Sequence
  Description of Artificial Sequence: Synthetic oligonucleotide
tacgcaacacacgaaccagac

SEQ ID NO: 42526 - DNA, 21 bp, Artificial Sequence
  Description of Artificial Sequence: Synthetic oligonucleotide
tacgcaacaccaagccaccac

SEQ ID NO: 42527 - DNA, 21 bp, Artificial Sequence
  Description of Artificial Sequence: Synthetic oligonucleotide
tacgcaacaacagtcctcaca

SEQ ID NO: 42528 - DNA, 21 bp, Artificial Sequence
  Description of Artificial Sequence: Synthetic oligonucleotide
tacgcaacagtcatcggactc

SEQ ID NO: 42529 - DNA, 21 bp, Artificial Sequence
  Description of Artificial Sequence: Synthetic oligonucleotide
tacgcagtcgaagcaagcaga

SEQ ID NO: 42530 - DNA, 21 bp, Artificial Sequence
  Description of Artificial Sequence: Synthetic oligonucleotide
tacgcagtcgaaggaaaaaac

SEQ ID NO: 42531 - DNA, 21 bp, Artificial Sequence
  Description of Artificial Sequence: Synthetic oligonucleotide
tacgcagtcagcagaccactc

SEQ ID NO: 42532 - DNA, 21 bp, Artificial Sequence
  Description of Artificial Sequence: Synthetic oligonucleotide
tacgcatacgaaggattcgca

SEQ ID NO: 42533 - DNA, 21 bp, Artificial Sequence
  Description of Artificial Sequence: Synthetic oligonucleotide
tacgcatacgaaagacaaatc

SEQ ID NO: 42534 - DNA, 21 bp, Artificial Sequence
  Description of Artificial Sequence: Synthetic oligonucleotide
tactgcgaaagcttcccagac

SEQ ID NO: 42535 - DNA, 21 bp, Artificial Sequence
  Description of Artificial Sequence: Synthetic oligonucleotide
tactgcagccaccaaagcgtc

SEQ ID NO: 42536 - DNA, 21 bp, Artificial Sequence
  Description of Artificial Sequence: Synthetic oligonucleotide
tactgcacaggaaacgacgca

SEQ ID NO: 42537 - DNA, 21 bp, Artificial Sequence
  Description of Artificial Sequence: Synthetic oligonucleotide
tacgacgcaatcagcaaccca

SEQ ID NO: 42538 - DNA, 21 bp, Artificial Sequence
  Description of Artificial Sequence: Synthetic oligonucleotide
tacgaccacgtcatcgcaaca

SEQ ID NO: 42539 - DNA, 21 bp, Artificial Sequence
  Description of Artificial Sequence: Synthetic oligonucleotide
tacgacaaagcaatgagccca

SEQ ID NO: 42540 - DNA, 21 bp, Artificial Sequence
  Description of Artificial Sequence: Synthetic oligonucleotide
tacgacctcggagtcacaaca

SEQ ID NO: 42541 - DNA, 21 bp, Artificial Sequence
  Description of Artificial Sequence: Synthetic oligonucleotide
tacgacatgggaccagtccca

SEQ ID NO: 42542 - DNA, 21 bp, Artificial Sequence
  Description of Artificial Sequence: Synthetic oligonucleotide
tacgacaacaaaacaagactc

SEQ ID NO: 42543 - DNA, 21 bp, Artificial Sequence
  Description of Artificial Sequence: Synthetic oligonucleotide
tacgacaacatgcactgcaaa

SEQ ID NO: 42544 - DNA, 21 bp, Artificial Sequence
  Description of Artificial Sequence: Synthetic oligonucleotide
tacgacaaccaactcaacaac

SEQ ID NO: 42545 - DNA, 21 bp, Artificial Sequence
  Description of Artificial Sequence: Synthetic oligonucleotide
tacgacccataccacagccca

SEQ ID NO: 42546 - DNA, 21 bp, Artificial Sequence
  Description of Artificial Sequence: Synthetic oligonucleotide
tacgacagagaaccactcgac

SEQ ID NO: 42547 - DNA, 21 bp, Artificial Sequence
  Description of Artificial Sequence: Synthetic oligonucleotide
tacgacagcaacacagaaaca

SEQ ID NO: 42548 - DNA, 21 bp, Artificial Sequence
  Description of Artificial Sequence: Synthetic oligonucleotide
tacgacagcagaggaccagca

SEQ ID NO: 42549 - DNA, 21 bp, Artificial Sequence
  Description of Artificial Sequence: Synthetic oligonucleotide
tacgacagcagcgtcccaaac

SEQ ID NO: 42550 - DNA, 21 bp, Artificial Sequence
  Description of Artificial Sequence: Synthetic oligonucleotide
tacgacagcgtcgcaacactc

SEQ ID NO: 42551 - DNA, 21 bp, Artificial Sequence
  Description of Artificial Sequence: Synthetic oligonucleotide
tacgacacacacggaagccca

SEQ ID NO: 42552 - DNA, 21 bp, Artificial Sequence
  Description of Artificial Sequence: Synthetic oligonucleotide
tacgacacaaaactccaaatg

SEQ ID NO: 42553 - DNA, 21 bp, Artificial Sequence
  Description of Artificial Sequence: Synthetic oligonucleotide
tacgaagcaccaacaagaagc

SEQ ID NO: 42554 - DNA, 21 bp, Artificial Sequence
  Description of Artificial Sequence: Synthetic oligonucleotide
tacgaagcaacaagcagcaac

SEQ ID NO: 42555 - DNA, 21 bp, Artificial Sequence
  Description of Artificial Sequence: Synthetic oligonucleotide
tacgaaggaagcccaagaaac

SEQ ID NO: 42556 - DNA, 21 bp, Artificial Sequence
  Description of Artificial Sequence: Synthetic oligonucleotide
tacgaaggatacaaactccca

SEQ ID NO: 42557 - DNA, 21 bp, Artificial Sequence
  Description of Artificial Sequence: Synthetic oligonucleotide
tacgaaatccaaggaacagga

SEQ ID NO: 42558 - DNA, 21 bp, Artificial Sequence
  Description of Artificial Sequence: Synthetic oligonucleotide
tacgaactcgcacaccacgca

SEQ ID NO: 42559 - DNA, 21 bp, Artificial Sequence
  Description of Artificial Sequence: Synthetic oligonucleotide
tacgaactccaactcttcagc

SEQ ID NO: 42560 - DNA, 21 bp, Artificial Sequence
  Description of Artificial Sequence: Synthetic oligonucleotide
tacgaactcagaagaatccca

SEQ ID NO: 42561 - DNA, 21 bp, Artificial Sequence
  Description of Artificial Sequence: Synthetic oligonucleotide
tacgaaccaggaacagacgca

SEQ ID NO: 42562 - DNA, 21 bp, Artificial Sequence
  Description of Artificial Sequence: Synthetic oligonucleotide
tacgaaccaaaagtcagagtc

SEQ ID NO: 42563 - DNA, 21 bp, Artificial Sequence
  Description of Artificial Sequence: Synthetic oligonucleotide
tacgaaagcagcaacgaccca

SEQ ID NO: 42564 - DNA, 21 bp, Artificial Sequence
  Description of Artificial Sequence: Synthetic oligonucleotide
tacgaaagctacatcgaaaga

SEQ ID NO: 42565 - DNA, 21 bp, Artificial Sequence
  Description of Artificial Sequence: Synthetic oligonucleotide
tacgaaacagcattcagagca

SEQ ID NO: 42566 - DNA, 21 bp, Artificial Sequence
  Description of Artificial Sequence: Synthetic oligonucleotide
tacgaaacagacatcagccaa

SEQ ID NO: 42567 - DNA, 21 bp, Artificial Sequence
  Description of Artificial Sequence: Synthetic oligonucleotide
tacgaaacagaactcagagca

SEQ ID NO: 42568 - DNA, 21 bp, Artificial Sequence
  Description of Artificial Sequence: Synthetic oligonucleotide
tacttcgcaggaagaacagac

SEQ ID NO: 42569 - DNA, 21 bp, Artificial Sequence
  Description of Artificial Sequence: Synthetic oligonucleotide
tacttcgcaagcccaacaagc

SEQ ID NO: 42570 - DNA, 21 bp, Artificial Sequence
  Description of Artificial Sequence: Synthetic oligonucleotide
tacttcgaagcaagcagcgca

SEQ ID NO: 42571 - DNA, 21 bp, Artificial Sequence
  Description of Artificial Sequence: Synthetic oligonucleotide
tacttcggaagcagcgcaaca

SEQ ID NO: 42572 - DNA, 21 bp, Artificial Sequence
  Description of Artificial Sequence: Synthetic oligonucleotide
tacttcggaagcagcgaccca

SEQ ID NO: 42573 - DNA, 21 bp, Artificial Sequence
  Description of Artificial Sequence: Synthetic oligonucleotide
tacttccacctcgcaacaagc

SEQ ID NO: 42574 - DNA, 21 bp, Artificial Sequence
  Description of Artificial Sequence: Synthetic oligonucleotide
tacttcccaagcatggtcgac

SEQ ID NO: 42575 - DNA, 21 bp, Artificial Sequence
  Description of Artificial Sequence: Synthetic oligonucleotide
tacttcagccacgacgaaaca

SEQ ID NO: 42576 - DNA, 21 bp, Artificial Sequence
  Description of Artificial Sequence: Synthetic oligonucleotide
tacttcacaaacgacagcgtc

SEQ ID NO: 42577 - DNA, 21 bp, Artificial Sequence
  Description of Artificial Sequence: Synthetic oligonucleotide
tacttcacaagcagaagcgaa

SEQ ID NO: 42578 - DNA, 21 bp, Artificial Sequence
  Description of Artificial Sequence: Synthetic oligonucleotide
tacttcgtcgcaaacaaccca

SEQ ID NO: 42579 - DNA, 21 bp, Artificial Sequence
  Description of Artificial Sequence: Synthetic oligonucleotide
tacttcgtcaaaatcctcatc

SEQ ID NO: 42580 - DNA, 21 bp, Artificial Sequence
  Description of Artificial Sequence: Synthetic oligonucleotide
tacggagcaagcccagacaca

SEQ ID NO: 42581 - DNA, 21 bp, Artificial Sequence
  Description of Artificial Sequence: Synthetic oligonucleotide
tacggagcagtcgcaaaacac

SEQ ID NO: 42582 - DNA, 21 bp, Artificial Sequence
  Description of Artificial Sequence: Synthetic oligonucleotide
tacggagcagtcagacacaac

SEQ ID NO: 42583 - DNA, 21 bp, Artificial Sequence
  Description of Artificial Sequence: Synthetic oligonucleotide
tacggagcagtcagcccagtc

SEQ ID NO: 42584 - DNA, 21 bp, Artificial Sequence
  Description of Artificial Sequence: Synthetic oligonucleotide
tacggagacccaggaccacca

SEQ ID NO: 42585 - DNA, 21 bp, Artificial Sequence
  Description of Artificial Sequence: Synthetic oligonucleotide
tacggagacgtcgcagacagc

SEQ ID NO: 42586 - DNA, 21 bp, Artificial Sequence
  Description of Artificial Sequence: Synthetic oligonucleotide
tacggagaaccaatcagacca

SEQ ID NO: 42587 - DNA, 21 bp, Artificial Sequence
  Description of Artificial Sequence: Synthetic oligonucleotide
tacggaggagcaggaagcctc

SEQ ID NO: 42588 - DNA, 21 bp, Artificial Sequence
  Description of Artificial Sequence: Synthetic oligonucleotide
tacggaggacacacagtcagc

SEQ ID NO: 42589 - DNA, 21 bp, Artificial Sequence
  Description of Artificial Sequence: Synthetic oligonucleotide
tacggaggaccaaacatgaca

SEQ ID NO: 42590 - DNA, 21 bp, Artificial Sequence
  Description of Artificial Sequence: Synthetic oligonucleotide
tacggaatcagcccaaaaaca

SEQ ID NO: 42591 - DNA, 21 bp, Artificial Sequence
  Description of Artificial Sequence: Synthetic oligonucleotide
tacggaaaaatgacaagcgac

SEQ ID NO: 42592 - DNA, 21 bp, Artificial Sequence
  Description of Artificial Sequence: Synthetic oligonucleotide
tacggactcaaaagcgcaatc

SEQ ID NO: 42593 - DNA, 21 bp, Artificial Sequence
  Description of Artificial Sequence: Synthetic oligonucleotide
tacggactcagcgcacacagc

SEQ ID NO: 42594 - DNA, 21 bp, Artificial Sequence
  Description of Artificial Sequence: Synthetic oligonucleotide
tacggaatgaaagtcgcacaa

SEQ ID NO: 42595 - DNA, 21 bp, Artificial Sequence
  Description of Artificial Sequence: Synthetic oligonucleotide
tacggaatgagcttcaaagaa

SEQ ID NO: 42596 - DNA, 21 bp, Artificial Sequence
  Description of Artificial Sequence: Synthetic oligonucleotide
tacggaaacgcaagagcagtc

SEQ ID NO: 42597 - DNA, 21 bp, Artificial Sequence
  Description of Artificial Sequence: Synthetic oligonucleotide
tacggaaacggaagcctcgga

SEQ ID NO: 42598 - DNA, 21 bp, Artificial Sequence
  Description of Artificial Sequence: Synthetic oligonucleotide
tacggaaaccacctcctcagc

SEQ ID NO: 42599 - DNA, 21 bp, Artificial Sequence
  Description of Artificial Sequence: Synthetic oligonucleotide
tacggaccagcactcctcagc

SEQ ID NO: 42600 - DNA, 21 bp, Artificial Sequence
  Description of Artificial Sequence: Synthetic oligonucleotide
tacggaccagacctcagacaa

SEQ ID NO: 42601 - DNA, 21 bp, Artificial Sequence
  Description of Artificial Sequence: Synthetic oligonucleotide
tacggaccacacgcaaaaagc

SEQ ID NO: 42602 - DNA, 21 bp, Artificial Sequence
  Description of Artificial Sequence: Synthetic oligonucleotide
tacggacaaagcggagcaagc

SEQ ID NO: 42603 - DNA, 21 bp, Artificial Sequence
  Description of Artificial Sequence: Synthetic oligonucleotide
tacggacaaagcaaaagcagc

SEQ ID NO: 42604 - DNA, 21 bp, Artificial Sequence
  Description of Artificial Sequence: Synthetic oligonucleotide
tacggaagaaacatgacacaa

SEQ ID NO: 42605 - DNA, 21 bp, Artificial Sequence
  Description of Artificial Sequence: Synthetic oligonucleotide
tacggaagaagccaaagcctc

SEQ ID NO: 42606 - DNA, 21 bp, Artificial Sequence
  Description of Artificial Sequence: Synthetic oligonucleotide
tacggaagcctcaacatcgca

SEQ ID NO: 42607 - DNA, 21 bp, Artificial Sequence
  Description of Artificial Sequence: Synthetic oligonucleotide
tacggaagcccaagagtcaca

SEQ ID NO: 42608 - DNA, 21 bp, Artificial Sequence
  Description of Artificial Sequence: Synthetic oligonucleotide
tacggaagcagctgccacaca

SEQ ID NO: 42609 - DNA, 21 bp, Artificial Sequence
  Description of Artificial Sequence: Synthetic oligonucleotide
tacggaagcagcagaacaaca

SEQ ID NO: 42610 - DNA, 21 bp, Artificial Sequence
  Description of Artificial Sequence: Synthetic oligonucleotide
tacggaacagcaacacaagca

SEQ ID NO: 42611 - DNA, 21 bp, Artificial Sequence
  Description of Artificial Sequence: Synthetic oligonucleotide
tacggaacagaaacaaactac

SEQ ID NO: 42612 - DNA, 21 bp, Artificial Sequence
  Description of Artificial Sequence: Synthetic oligonucleotide
tacggaacaggaggacacctc

SEQ ID NO: 42613 - DNA, 21 bp, Artificial Sequence
  Description of Artificial Sequence: Synthetic oligonucleotide
tacggaacactcgcaagacac

SEQ ID NO: 42614 - DNA, 21 bp, Artificial Sequence
  Description of Artificial Sequence: Synthetic oligonucleotide
tacggagtcagaccaagcaca

SEQ ID NO: 42615 - DNA, 21 bp, Artificial Sequence
  Description of Artificial Sequence: Synthetic oligonucleotide
tacggatacgcagcactcaac

SEQ ID NO: 42616 - DNA, 21 bp, Artificial Sequence
  Description of Artificial Sequence: Synthetic oligonucleotide
taccacgcaggaccaccagac

SEQ ID NO: 42617 - DNA, 21 bp, Artificial Sequence
  Description of Artificial Sequence: Synthetic oligonucleotide
taccacggaagaacagtcgtc

SEQ ID NO: 42618 - DNA, 21 bp, Artificial Sequence
  Description of Artificial Sequence: Synthetic oligonucleotide
taccacaaaacaggagtccac

SEQ ID NO: 42619 - DNA, 21 bp, Artificial Sequence
  Description of Artificial Sequence: Synthetic oligonucleotide
taccacatgacagtcaaaagc

SEQ ID NO: 42620 - DNA, 21 bp, Artificial Sequence
  Description of Artificial Sequence: Synthetic oligonucleotide
taccacaaccacggaacaagc

SEQ ID NO: 42621 - DNA, 21 bp, Artificial Sequence
  Description of Artificial Sequence: Synthetic oligonucleotide
taccacaacctccaaggaatg

SEQ ID NO: 42622 - DNA, 21 bp, Artificial Sequence
  Description of Artificial Sequence: Synthetic oligonucleotide
taccacaacaacagcagccca

SEQ ID NO: 42623 - DNA, 21 bp, Artificial Sequence
  Description of Artificial Sequence: Synthetic oligonucleotide
taccacccaccaagagaaaac

SEQ ID NO: 42624 - DNA, 21 bp, Artificial Sequence
  Description of Artificial Sequence: Synthetic oligonucleotide
taccacccagtcatcgcacca

SEQ ID NO: 42625 - DNA, 21 bp, Artificial Sequence
  Description of Artificial Sequence: Synthetic oligonucleotide
taccacagcgaagtcagagca

SEQ ID NO: 42626 - DNA, 21 bp, Artificial Sequence
  Description of Artificial Sequence: Synthetic oligonucleotide
taccacagcaacacaacaagc

SEQ ID NO: 42627 - DNA, 21 bp, Artificial Sequence
  Description of Artificial Sequence: Synthetic oligonucleotide
taccacagcgtcagcacaagc

SEQ ID NO: 42628 - DNA, 21 bp, Artificial Sequence
  Description of Artificial Sequence: Synthetic oligonucleotide
taccacacagcaagcatgaac

SEQ ID NO: 42629 - DNA, 21 bp, Artificial Sequence
  Description of Artificial Sequence: Synthetic oligonucleotide
taccacacactcaacaaagac

SEQ ID NO: 42630 - DNA, 21 bp, Artificial Sequence
  Description of Artificial Sequence: Synthetic oligonucleotide
taccacacagtcagcagcaac

SEQ ID NO: 42631 - DNA, 21 bp, Artificial Sequence
  Description of Artificial Sequence: Synthetic oligonucleotide
taccacgtcagagcagcaagc

SEQ ID NO: 42632 - DNA, 21 bp, Artificial Sequence
  Description of Artificial Sequence: Synthetic oligonucleotide
tacatcgaaacaagagtcaca

SEQ ID NO: 42633 - DNA, 21 bp, Artificial Sequence
  Description of Artificial Sequence: Synthetic oligonucleotide
tacatcggagaaagagaccca

SEQ ID NO: 42634 - DNA, 21 bp, Artificial Sequence
  Description of Artificial Sequence: Synthetic oligonucleotide
tacatcggaccagacctcgca

SEQ ID NO: 42635 - DNA, 21 bp, Artificial Sequence
  Description of Artificial Sequence: Synthetic oligonucleotide
tacatccacccagaacaagaa

SEQ ID NO: 42636 - DNA, 21 bp, Artificial Sequence
  Description of Artificial Sequence: Synthetic oligonucleotide
tacatcatcgcacaagaatgc

SEQ ID NO: 42637 - DNA, 21 bp, Artificial Sequence
  Description of Artificial Sequence: Synthetic oligonucleotide
tacatcctcacaagcgaaaca

SEQ ID NO: 42638 - DNA, 21 bp, Artificial Sequence
  Description of Artificial Sequence: Synthetic oligonucleotide
tacatcaacgcactcatcgca

SEQ ID NO: 42639 - DNA, 21 bp, Artificial Sequence
  Description of Artificial Sequence: Synthetic oligonucleotide
tacatcccaagcaaattcaca

SEQ ID NO: 42640 - DNA, 21 bp, Artificial Sequence
  Description of Artificial Sequence: Synthetic oligonucleotide
tacatccaagtcccaaaagga

SEQ ID NO: 42641 - DNA, 21 bp, Artificial Sequence
  Description of Artificial Sequence: Synthetic oligonucleotide
tacatcagcgcaggaacaagc

SEQ ID NO: 42642 - DNA, 21 bp, Artificial Sequence
  Description of Artificial Sequence: Synthetic oligonucleotide
tacatcagcccagtcagcgtc

SEQ ID NO: 42643 - DNA, 21 bp, Artificial Sequence
  Description of Artificial Sequence: Synthetic oligonucleotide
tacaaagcagcaagcgtccca

SEQ ID NO: 42644 - DNA, 21 bp, Artificial Sequence
  Description of Artificial Sequence: Synthetic oligonucleotide
tacaaaggagcaccagtcaca

SEQ ID NO: 42645 - DNA, 21 bp, Artificial Sequence
  Description of Artificial Sequence: Synthetic oligonucleotide
tacaaaggagcaagcctcgac

SEQ ID NO: 42646 - DNA, 21 bp, Artificial Sequence
  Description of Artificial Sequence: Synthetic oligonucleotide
tacaaaggaggaaacagcttc

SEQ ID NO: 42647 - DNA, 21 bp, Artificial Sequence
  Description of Artificial Sequence: Synthetic oligonucleotide
tacaaactcaacgcaacatac

SEQ ID NO: 42648 - DNA, 21 bp, Artificial Sequence
  Description of Artificial Sequence: Synthetic oligonucleotide
tacaaactccaacaagtcagc

SEQ ID NO: 42649 - DNA, 21 bp, Artificial Sequence
  Description of Artificial Sequence: Synthetic oligonucleotide
tacaaaccagcaaacgtcaac

SEQ ID NO: 42650 - DNA, 21 bp, Artificial Sequence
  Description of Artificial Sequence: Synthetic oligonucleotide
tacaaaccaagcgaaggaaca

SEQ ID NO: 42651 - DNA, 21 bp, Artificial Sequence
  Description of Artificial Sequence: Synthetic oligonucleotide
tacaaacaacacgtcatcagc

SEQ ID NO: 42652 - DNA, 21 bp, Artificial Sequence
  Description of Artificial Sequence: Synthetic oligonucleotide
tacaaaagcagcgcaggaagc

SEQ ID NO: 42653 - DNA, 21 bp, Artificial Sequence
  Description of Artificial Sequence: Synthetic oligonucleotide
tacaaaacaggaagactcgca

SEQ ID NO: 42654 - DNA, 21 bp, Artificial Sequence
  Description of Artificial Sequence: Synthetic oligonucleotide
tacaaagtcctcccaagcgca

SEQ ID NO: 42655 - DNA, 21 bp, Artificial Sequence
  Description of Artificial Sequence: Synthetic oligonucleotide
tacctcgcaggagaaagaaca

SEQ ID NO: 42656 - DNA, 21 bp, Artificial Sequence
  Description of Artificial Sequence: Synthetic oligonucleotide
tacctcgcacacggactccaa

SEQ ID NO: 42657 - DNA, 21 bp, Artificial Sequence
  Description of Artificial Sequence: Synthetic oligonucleotide
tacctcgcactccaatacaaa

SEQ ID NO: 42658 - DNA, 21 bp, Artificial Sequence
  Description of Artificial Sequence: Synthetic oligonucleotide
tacctcgaccacatctgggaa

SEQ ID NO: 42659 - DNA, 21 bp, Artificial Sequence
  Description of Artificial Sequence: Synthetic oligonucleotide
tacctcgacacaagcccagtc

SEQ ID NO: 42660 - DNA, 21 bp, Artificial Sequence
  Description of Artificial Sequence: Synthetic oligonucleotide
tacctcgaaagatacggaagc

SEQ ID NO: 42661 - DNA, 21 bp, Artificial Sequence
  Description of Artificial Sequence: Synthetic oligonucleotide
tacctcggagacaaaatggca

SEQ ID NO: 42662 - DNA, 21 bp, Artificial Sequence
  Description of Artificial Sequence: Synthetic oligonucleotide
tacctcggacacagcacaaaa

SEQ ID NO: 42663 - DNA, 21 bp, Artificial Sequence
  Description of Artificial Sequence: Synthetic oligonucleotide
tacctcggaacacaagtcaac

SEQ ID NO: 42664 - DNA, 21 bp, Artificial Sequence
  Description of Artificial Sequence: Synthetic oligonucleotide
tacctcaaattcacagacagc

SEQ ID NO: 42665 - DNA, 21 bp, Artificial Sequence
  Description of Artificial Sequence: Synthetic oligonucleotide
tacctcaaaagcaacagccca

SEQ ID NO: 42666 - DNA, 21 bp, Artificial Sequence
  Description of Artificial Sequence: Synthetic oligonucleotide
tacctcctcagcgaactcagc

SEQ ID NO: 42667 - DNA, 21 bp, Artificial Sequence
  Description of Artificial Sequence: Synthetic oligonucleotide
tacctcctcagccacgcagga

SEQ ID NO: 42668 - DNA, 21 bp, Artificial Sequence
  Description of Artificial Sequence: Synthetic oligonucleotide
tacctcatgcacgcaagcgca

SEQ ID NO: 42669 - DNA, 21 bp, Artificial Sequence
  Description of Artificial Sequence: Synthetic oligonucleotide
tacctcaacgtcacaccagca

SEQ ID NO: 42670 - DNA, 21 bp, Artificial Sequence
  Description of Artificial Sequence: Synthetic oligonucleotide
tacctcccaaaaagcaacttc

SEQ ID NO: 42671 - DNA, 21 bp, Artificial Sequence
  Description of Artificial Sequence: Synthetic oligonucleotide
tacctcccactcacagcagtc

SEQ ID NO: 42672 - DNA, 21 bp, Artificial Sequence
  Description of Artificial Sequence: Synthetic oligonucleotide
tacctcccaagaggaacattc

SEQ ID NO: 42673 - DNA, 21 bp, Artificial Sequence
  Description of Artificial Sequence: Synthetic oligonucleotide
tacctcccaagaggaacaagc

SEQ ID NO: 42674 - DNA, 21 bp, Artificial Sequence
  Description of Artificial Sequence: Synthetic oligonucleotide
tacctcccaacaagacacgaa

SEQ ID NO: 42675 - DNA, 21 bp, Artificial Sequence
  Description of Artificial Sequence: Synthetic oligonucleotide
tacctccaagcacactacaac

SEQ ID NO: 42676 - DNA, 21 bp, Artificial Sequence
  Description of Artificial Sequence: Synthetic oligonucleotide
tacctccaacacggacacaca

SEQ ID NO: 42677 - DNA, 21 bp, Artificial Sequence
  Description of Artificial Sequence: Synthetic oligonucleotide
tacctccaaacagaagaccca

SEQ ID NO: 42678 - DNA, 21 bp, Artificial Sequence
  Description of Artificial Sequence: Synthetic oligonucleotide
tacctcagactccaaacagga

SEQ ID NO: 42679 - DNA, 21 bp, Artificial Sequence
  Description of Artificial Sequence: Synthetic oligonucleotide
tacctcagaccacaaagcgga

SEQ ID NO: 42680 - DNA, 21 bp, Artificial Sequence
  Description of Artificial Sequence: Synthetic oligonucleotide
tacctcagcgacccaagaatg

SEQ ID NO: 42681 - DNA, 21 bp, Artificial Sequence
  Description of Artificial Sequence: Synthetic oligonucleotide
tacctcagcggaatgatcaaa

SEQ ID NO: 42682 - DNA, 21 bp, Artificial Sequence
  Description of Artificial Sequence: Synthetic oligonucleotide
tacctcagccacagaagcgaa

SEQ ID NO: 42683 - DNA, 21 bp, Artificial Sequence
  Description of Artificial Sequence: Synthetic oligonucleotide
tacctcagcaacacagaaatg

SEQ ID NO: 42684 - DNA, 21 bp, Artificial Sequence
  Description of Artificial Sequence: Synthetic oligonucleotide
tacctcagcgtcgacgaaagc

SEQ ID NO: 42685 - DNA, 21 bp, Artificial Sequence
  Description of Artificial Sequence: Synthetic oligonucleotide
tacctcagcgtccaaagcaac

SEQ ID NO: 42686 - DNA, 21 bp, Artificial Sequence
  Description of Artificial Sequence: Synthetic oligonucleotide
tacctcacaaaacacacaagc

SEQ ID NO: 42687 - DNA, 21 bp, Artificial Sequence
  Description of Artificial Sequence: Synthetic oligonucleotide
tacctcacacaactcagcaca

SEQ ID NO: 42688 - DNA, 21 bp, Artificial Sequence
  Description of Artificial Sequence: Synthetic oligonucleotide
tacctcgtcgaaacaacaaaa

SEQ ID NO: 42689 - DNA, 21 bp, Artificial Sequence
  Description of Artificial Sequence: Synthetic oligonucleotide
tacctcgtcggacaaagagtc

SEQ ID NO: 42690 - DNA, 21 bp, Artificial Sequence
  Description of Artificial Sequence: Synthetic oligonucleotide
tacatggacacagacgacaga

SEQ ID NO: 42691 - DNA, 21 bp, Artificial Sequence
  Description of Artificial Sequence: Synthetic oligonucleotide
tacatgggacacgcactcagc

SEQ ID NO: 42692 - DNA, 21 bp, Artificial Sequence
  Description of Artificial Sequence: Synthetic oligonucleotide
tacatgcacgcaagcaacgtc

SEQ ID NO: 42693 - DNA, 21 bp, Artificial Sequence
  Description of Artificial Sequence: Synthetic oligonucleotide
tacatgcacggaagccacgca

SEQ ID NO: 42694 - DNA, 21 bp, Artificial Sequence
  Description of Artificial Sequence: Synthetic oligonucleotide
tacatgcacagcccaacacca

SEQ ID NO: 42695 - DNA, 21 bp, Artificial Sequence
  Description of Artificial Sequence: Synthetic oligonucleotide
tacatgcacagcagcagaaca

SEQ ID NO: 42696 - DNA, 21 bp, Artificial Sequence
  Description of Artificial Sequence: Synthetic oligonucleotide
tacatgcactacacagtcaca

SEQ ID NO: 42697 - DNA, 21 bp, Artificial Sequence
  Description of Artificial Sequence: Synthetic oligonucleotide
tacatgccagcaccagtccaa

SEQ ID NO: 42698 - DNA, 21 bp, Artificial Sequence
  Description of Artificial Sequence: Synthetic oligonucleotide
tacatgcaaacaagagacaca

SEQ ID NO: 42699 - DNA, 21 bp, Artificial Sequence
  Description of Artificial Sequence: Synthetic oligonucleotide
tacatgcaagtcttcagccca

SEQ ID NO: 42700 - DNA, 21 bp, Artificial Sequence
  Description of Artificial Sequence: Synthetic oligonucleotide
tacatgagcgcaatcagaatg

SEQ ID NO: 42701 - DNA, 21 bp, Artificial Sequence
  Description of Artificial Sequence: Synthetic oligonucleotide
tacatgagcgcaacaacaaga

SEQ ID NO: 42702 - DNA, 21 bp, Artificial Sequence
  Description of Artificial Sequence: Synthetic oligonucleotide
tacatgagcagaacagcaagc

SEQ ID NO: 42703 - DNA, 21 bp, Artificial Sequence
  Description of Artificial Sequence: Synthetic oligonucleotide
tacatgagcgtcacacaacaa

SEQ ID NO: 42704 - DNA, 21 bp, Artificial Sequence
  Description of Artificial Sequence: Synthetic oligonucleotide
tacatgacaggaagaccacac

SEQ ID NO: 42705 - DNA, 21 bp, Artificial Sequence
  Description of Artificial Sequence: Synthetic oligonucleotide
tacatgacaaaaaacttcgga

SEQ ID NO: 42706 - DNA, 21 bp, Artificial Sequence
  Description of Artificial Sequence: Synthetic oligonucleotide
tacatgacaaacctccaacca

SEQ ID NO: 42707 - DNA, 21 bp, Artificial Sequence
  Description of Artificial Sequence: Synthetic oligonucleotide
tacatgacaagccaaagcaga

SEQ ID NO: 42708 - DNA, 21 bp, Artificial Sequence
  Description of Artificial Sequence: Synthetic oligonucleotide
tacatgtacgacggaagcgtc

SEQ ID NO: 42709 - DNA, 21 bp, Artificial Sequence
  Description of Artificial Sequence: Synthetic oligonucleotide
tacaacgcagcaagcggactc

SEQ ID NO: 42710 - DNA, 21 bp, Artificial Sequence
  Description of Artificial Sequence: Synthetic oligonucleotide
tacaacgcaggaggaccaaga

SEQ ID NO: 42711 - DNA, 21 bp, Artificial Sequence
  Description of Artificial Sequence: Synthetic oligonucleotide
tacaacgcactcctccaacca

SEQ ID NO: 42712 - DNA, 21 bp, Artificial Sequence
  Description of Artificial Sequence: Synthetic oligonucleotide
tacaacgacgtcatgagcaac

SEQ ID NO: 42713 - DNA, 21 bp, Artificial Sequence
  Description of Artificial Sequence: Synthetic oligonucleotide
tacaacggaaacctcagactc

SEQ ID NO: 42714 - DNA, 21 bp, Artificial Sequence
  Description of Artificial Sequence: Synthetic oligonucleotide
tacaacggacaacacatcgca

SEQ ID NO: 42715 - DNA, 21 bp, Artificial Sequence
  Description of Artificial Sequence: Synthetic oligonucleotide
tacaacatcggaacaagcaac

SEQ ID NO: 42716 - DNA, 21 bp, Artificial Sequence
  Description of Artificial Sequence: Synthetic oligonucleotide
tacaacatcaaccaactcaca

SEQ ID NO: 42717 - DNA, 21 bp, Artificial Sequence
  Description of Artificial Sequence: Synthetic oligonucleotide
tacaacctcagaccactccaa

SEQ ID NO: 42718 - DNA, 21 bp, Artificial Sequence
  Description of Artificial Sequence: Synthetic oligonucleotide
tacaacctcagcggaccaagc

SEQ ID NO: 42719 - DNA, 21 bp, Artificial Sequence
  Description of Artificial Sequence: Synthetic oligonucleotide
tacaacctcagcaacccagca

SEQ ID NO: 42720 - DNA, 21 bp, Artificial Sequence
  Description of Artificial Sequence: Synthetic oligonucleotide
tacaacctcagcgtcggattc

SEQ ID NO: 42721 - DNA, 21 bp, Artificial Sequence
  Description of Artificial Sequence: Synthetic oligonucleotide
tacaacaacagcaacacaaca

SEQ ID NO: 42722 - DNA, 21 bp, Artificial Sequence
  Description of Artificial Sequence: Synthetic oligonucleotide
tacaacccactcaaccaaaga

SEQ ID NO: 42723 - DNA, 21 bp, Artificial Sequence
  Description of Artificial Sequence: Synthetic oligonucleotide
tacaacccaccagaaccactc

SEQ ID NO: 42724 - DNA, 21 bp, Artificial Sequence
  Description of Artificial Sequence: Synthetic oligonucleotide
tacaacccaccaagaagcagc

SEQ ID NO: 42725 - DNA, 21 bp, Artificial Sequence
  Description of Artificial Sequence: Synthetic oligonucleotide
tacaaccaacacggaccacca

SEQ ID NO: 42726 - DNA, 21 bp, Artificial Sequence
  Description of Artificial Sequence: Synthetic oligonucleotide
tacaaccaactcgcaagacca

SEQ ID NO: 42727 - DNA, 21 bp, Artificial Sequence
  Description of Artificial Sequence: Synthetic oligonucleotide
tacaaccaaagaccaatcgtc

SEQ ID NO: 42728 - DNA, 21 bp, Artificial Sequence
  Description of Artificial Sequence: Synthetic oligonucleotide
tacaacagagcaaacctcagc

SEQ ID NO: 42729 - DNA, 21 bp, Artificial Sequence
  Description of Artificial Sequence: Synthetic oligonucleotide
tacaacagaggacaaatgcaa

SEQ ID NO: 42730 - DNA, 21 bp, Artificial Sequence
  Description of Artificial Sequence: Synthetic oligonucleotide
tacaacagagtcgcaacaagc

SEQ ID NO: 42731 - DNA, 21 bp, Artificial Sequence
  Description of Artificial Sequence: Synthetic oligonucleotide
tacaacagcagcggagtccca

SEQ ID NO: 42732 - DNA, 21 bp, Artificial Sequence
  Description of Artificial Sequence: Synthetic oligonucleotide
tacaacagcagcagcctcgga

SEQ ID NO: 42733 - DNA, 21 bp, Artificial Sequence
  Description of Artificial Sequence: Synthetic oligonucleotide
tacaacagcacaggactcaga

SEQ ID NO: 42734 - DNA, 21 bp, Artificial Sequence
  Description of Artificial Sequence: Synthetic oligonucleotide
tacaacacaggaagaatcaca

SEQ ID NO: 42735 - DNA, 21 bp, Artificial Sequence
  Description of Artificial Sequence: Synthetic oligonucleotide
tacaacacaatcaaagcagtc

SEQ ID NO: 42736 - DNA, 21 bp, Artificial Sequence
  Description of Artificial Sequence: Synthetic oligonucleotide
tacaacacaccaagaatggaa

SEQ ID NO: 42737 - DNA, 21 bp, Artificial Sequence
  Description of Artificial Sequence: Synthetic oligonucleotide
tacaacgtcgaaacagacaac

SEQ ID NO: 42738 - DNA, 21 bp, Artificial Sequence
  Description of Artificial Sequence: Synthetic oligonucleotide
tacaacgtctacacagtccca

SEQ ID NO: 42739 - DNA, 21 bp, Artificial Sequence
  Description of Artificial Sequence: Synthetic oligonucleotide
tacccagcactcgacgtcttc

SEQ ID NO: 42740 - DNA, 21 bp, Artificial Sequence
  Description of Artificial Sequence: Synthetic oligonucleotide
tacccagcaaacagactcctc

SEQ ID NO: 42741 - DNA, 21 bp, Artificial Sequence
  Description of Artificial Sequence: Synthetic oligonucleotide
tacccagacagcgacctcctc

SEQ ID NO: 42742 - DNA, 21 bp, Artificial Sequence
  Description of Artificial Sequence: Synthetic oligonucleotide
tacccattcggagacatggca

SEQ ID NO: 42743 - DNA, 21 bp, Artificial Sequence
  Description of Artificial Sequence: Synthetic oligonucleotide
tacccaggagcaacagaaaca

SEQ ID NO: 42744 - DNA, 21 bp, Artificial Sequence
  Description of Artificial Sequence: Synthetic oligonucleotide
tacccaggaacaaaacaaatg

SEQ ID NO: 42745 - DNA, 21 bp, Artificial Sequence
  Description of Artificial Sequence: Synthetic oligonucleotide
tacccaggagtcacagtcaaa

SEQ ID NO: 42746 - DNA, 21 bp, Artificial Sequence
  Description of Artificial Sequence: Synthetic oligonucleotide
tacccacacgcagcaagctgg

SEQ ID NO: 42747 - DNA, 21 bp, Artificial Sequence
  Description of Artificial Sequence: Synthetic oligonucleotide
tacccacaccacagccaacac

SEQ ID NO: 42748 - DNA, 21 bp, Artificial Sequence
  Description of Artificial Sequence: Synthetic oligonucleotide
tacccacacacaccagcagca

SEQ ID NO: 42749 - DNA, 21 bp, Artificial Sequence
  Description of Artificial Sequence: Synthetic oligonucleotide
tacccaatcgcaacagtcaga

SEQ ID NO: 42750 - DNA, 21 bp, Artificial Sequence
  Description of Artificial Sequence: Synthetic oligonucleotide
tacccaatcagaccactcgga

SEQ ID NO: 42751 - DNA, 21 bp, Artificial Sequence
  Description of Artificial Sequence: Synthetic oligonucleotide
tacccaaaagtcccaacattc

SEQ ID NO: 42752 - DNA, 21 bp, Artificial Sequence
  Description of Artificial Sequence: Synthetic oligonucleotide
tacccaaaagtctacagcgca

SEQ ID NO: 42753 - DNA, 21 bp, Artificial Sequence
  Description of Artificial Sequence: Synthetic oligonucleotide
tacccactcagcacaagcgca

SEQ ID NO: 42754 - DNA, 21 bp, Artificial Sequence
  Description of Artificial Sequence: Synthetic oligonucleotide
tacccaatgccaagcccacca

SEQ ID NO: 42755 - DNA, 21 bp, Artificial Sequence
  Description of Artificial Sequence: Synthetic oligonucleotide
tacccaaacgacagctacgca

SEQ ID NO: 42756 - DNA, 21 bp, Artificial Sequence
  Description of Artificial Sequence: Synthetic oligonucleotide
tacccaaaccacagcagaaac

SEQ ID NO: 42757 - DNA, 21 bp, Artificial Sequence
  Description of Artificial Sequence: Synthetic oligonucleotide
tacccaaacagcctcagcctc

SEQ ID NO: 42758 - DNA, 21 bp, Artificial Sequence
  Description of Artificial Sequence: Synthetic oligonucleotide
tacccaccagacagccaccca

SEQ ID NO: 42759 - DNA, 21 bp, Artificial Sequence
  Description of Artificial Sequence: Synthetic oligonucleotide
tacccaccaatcgcacaagga

SEQ ID NO: 42760 - DNA, 21 bp, Artificial Sequence
  Description of Artificial Sequence: Synthetic oligonucleotide
tacccaccaaaactcggaagc

SEQ ID NO: 42761 - DNA, 21 bp, Artificial Sequence
  Description of Artificial Sequence: Synthetic oligonucleotide
tacccaccaaaatacgcaaac

SEQ ID NO: 42762 - DNA, 21 bp, Artificial Sequence
  Description of Artificial Sequence: Synthetic oligonucleotide
tacccaccaccaaaagcaagc

SEQ ID NO: 42763 - DNA, 21 bp, Artificial Sequence
  Description of Artificial Sequence: Synthetic oligonucleotide
tacccaccaagcggatacaac

SEQ ID NO: 42764 - DNA, 21 bp, Artificial Sequence
  Description of Artificial Sequence: Synthetic oligonucleotide
tacccaccaacagcaagagca

SEQ ID NO: 42765 - DNA, 21 bp, Artificial Sequence
  Description of Artificial Sequence: Synthetic oligonucleotide
tacccaccaacaccactccca

SEQ ID NO: 42766 - DNA, 21 bp, Artificial Sequence
  Description of Artificial Sequence: Synthetic oligonucleotide
tacccaccatggcacaaccca

SEQ ID NO: 42767 - DNA, 21 bp, Artificial Sequence
  Description of Artificial Sequence: Synthetic oligonucleotide
tacccaagagacgcaagcagc

SEQ ID NO: 42768 - DNA, 21 bp, Artificial Sequence
  Description of Artificial Sequence: Synthetic oligonucleotide
tacccaagagaaaaaagcctc

SEQ ID NO: 42769 - DNA, 21 bp, Artificial Sequence
  Description of Artificial Sequence: Synthetic oligonucleotide
tacccaagacacccaagcttc

SEQ ID NO: 42770 - DNA, 21 bp, Artificial Sequence
  Description of Artificial Sequence: Synthetic oligonucleotide
tacccaagaacactcccagaa

SEQ ID NO: 42771 - DNA, 21 bp, Artificial Sequence
  Description of Artificial Sequence: Synthetic oligonucleotide
tacccaagcgcaagcagcatg

SEQ ID NO: 42772 - DNA, 21 bp, Artificial Sequence
  Description of Artificial Sequence: Synthetic oligonucleotide
tacccaagccacctcctcaac

SEQ ID NO: 42773 - DNA, 21 bp, Artificial Sequence
  Description of Artificial Sequence: Synthetic oligonucleotide
tacccaagcccagcaggagaa

SEQ ID NO: 42774 - DNA, 21 bp, Artificial Sequence
  Description of Artificial Sequence: Synthetic oligonucleotide
tacccaagcccaagcaacctc

SEQ ID NO: 42775 - DNA, 21 bp, Artificial Sequence
  Description of Artificial Sequence: Synthetic oligonucleotide
tacccaagcagcagcatgcca

SEQ ID NO: 42776 - DNA, 21 bp, Artificial Sequence
  Description of Artificial Sequence: Synthetic oligonucleotide
tacccaacaggagaaacacca

SEQ ID NO: 42777 - DNA, 21 bp, Artificial Sequence
  Description of Artificial Sequence: Synthetic oligonucleotide
tacccaacacacagccacatg

SEQ ID NO: 42778 - DNA, 21 bp, Artificial Sequence
  Description of Artificial Sequence: Synthetic oligonucleotide
tacccaacaaaacacctccac

SEQ ID NO: 42779 - DNA, 21 bp, Artificial Sequence
  Description of Artificial Sequence: Synthetic oligonucleotide
tacccaacaacaccactcatg

SEQ ID NO: 42780 - DNA, 21 bp, Artificial Sequence
  Description of Artificial Sequence: Synthetic oligonucleotide
tacccagtcaacgcaccaaca

SEQ ID NO: 42781 - DNA, 21 bp, Artificial Sequence
  Description of Artificial Sequence: Synthetic oligonucleotide
tacccagtccaagacgcactc

SEQ ID NO: 42782 - DNA, 21 bp, Artificial Sequence
  Description of Artificial Sequence: Synthetic oligonucleotide
tacccagtcagcacaacacaa

SEQ ID NO: 42783 - DNA, 21 bp, Artificial Sequence
  Description of Artificial Sequence: Synthetic oligonucleotide
taccaaggaatcgcactcgga

SEQ ID NO: 42784 - DNA, 21 bp, Artificial Sequence
  Description of Artificial Sequence: Synthetic oligonucleotide
taccaaggaacactcccaagc

SEQ ID NO: 42785 - DNA, 21 bp, Artificial Sequence
  Description of Artificial Sequence: Synthetic oligonucleotide
taccaactcgacaacacacca

SEQ ID NO: 42786 - DNA, 21 bp, Artificial Sequence
  Description of Artificial Sequence: Synthetic oligonucleotide
taccaactccaaagaagcgaa

SEQ ID NO: 42787 - DNA, 21 bp, Artificial Sequence
  Description of Artificial Sequence: Synthetic oligonucleotide
taccaactcagacaaagccca

SEQ ID NO: 42788 - DNA, 21 bp, Artificial Sequence
  Description of Artificial Sequence: Synthetic oligonucleotide
taccaactcgtcacacaacca

SEQ ID NO: 42789 - DNA, 21 bp, Artificial Sequence
  Description of Artificial Sequence: Synthetic oligonucleotide
taccaaccaccagacatggga

SEQ ID NO: 42790 - DNA, 21 bp, Artificial Sequence
  Description of Artificial Sequence: Synthetic oligonucleotide
taccaacaagacggaagatgc

SEQ ID NO: 42791 - DNA, 21 bp, Artificial Sequence
  Description of Artificial Sequence: Synthetic oligonucleotide
taccaaagagtcagcagcagc

SEQ ID NO: 42792 - DNA, 21 bp, Artificial Sequence
  Description of Artificial Sequence: Synthetic oligonucleotide
taccaaagcgacggaaaccca

SEQ ID NO: 42793 - DNA, 21 bp, Artificial Sequence
  Description of Artificial Sequence: Synthetic oligonucleotide
taccaaacagaaatcacaaga

SEQ ID NO: 42794 - DNA, 21 bp, Artificial Sequence
  Description of Artificial Sequence: Synthetic oligonucleotide
taccaaacatacacaagagaa

SEQ ID NO: 42795 - DNA, 21 bp, Artificial Sequence
  Description of Artificial Sequence: Synthetic oligonucleotide
taccaagtcaaaacaggacca

SEQ ID NO: 42796 - DNA, 21 bp, Artificial Sequence
  Description of Artificial Sequence: Synthetic oligonucleotide
taccaagtcaacgcaggaatg

SEQ ID NO: 42797 - DNA, 21 bp, Artificial Sequence
  Description of Artificial Sequence: Synthetic oligonucleotide
tacagagcagacggagaagca

SEQ ID NO: 42798 - DNA, 21 bp, Artificial Sequence
  Description of Artificial Sequence: Synthetic oligonucleotide
tacagagcaatggcaccacca

SEQ ID NO: 42799 - DNA, 21 bp, Artificial Sequence
  Description of Artificial Sequence: Synthetic oligonucleotide
tacagagcaaacagcccagtc

SEQ ID NO: 42800 - DNA, 21 bp, Artificial Sequence
  Description of Artificial Sequence: Synthetic oligonucleotide
tacagagcaagcggagaactc

SEQ ID NO: 42801 - DNA, 21 bp, Artificial Sequence
  Description of Artificial Sequence: Synthetic oligonucleotide
tacagagaccacgaagtcctc

SEQ ID NO: 42802 - DNA, 21 bp, Artificial Sequence
  Description of Artificial Sequence: Synthetic oligonucleotide
tacagagacatccaaagagga

SEQ ID NO: 42803 - DNA, 21 bp, Artificial Sequence
  Description of Artificial Sequence: Synthetic oligonucleotide
tacagagacaacagaccaaac

SEQ ID NO: 42804 - DNA, 21 bp, Artificial Sequence
  Description of Artificial Sequence: Synthetic oligonucleotide
tacagagacagcagcaacatc

SEQ ID NO: 42805 - DNA, 21 bp, Artificial Sequence
  Description of Artificial Sequence: Synthetic oligonucleotide
tacagagaaatggcaaacaga

SEQ ID NO: 42806 - DNA, 21 bp, Artificial Sequence
  Description of Artificial Sequence: Synthetic oligonucleotide
tacagagaaaacgcaagagca

SEQ ID NO: 42807 - DNA, 21 bp, Artificial Sequence
  Description of Artificial Sequence: Synthetic oligonucleotide
tacagaggaatcacactcgac

SEQ ID NO: 42808 - DNA, 21 bp, Artificial Sequence
  Description of Artificial Sequence: Synthetic oligonucleotide
tacagaggaaaccacgcacca

SEQ ID NO: 42809 - DNA, 21 bp, Artificial Sequence
  Description of Artificial Sequence: Synthetic oligonucleotide
tacagaggataccacgtcgaa

SEQ ID NO: 42810 - DNA, 21 bp, Artificial Sequence
  Description of Artificial Sequence: Synthetic oligonucleotide
tacagacacggaagcatcgaa

SEQ ID NO: 42811 - DNA, 21 bp, Artificial Sequence
  Description of Artificial Sequence: Synthetic oligonucleotide
tacagactctacgcagacgac

SEQ ID NO: 42812 - DNA, 21 bp, Artificial Sequence
  Description of Artificial Sequence: Synthetic oligonucleotide
tacagaatgggaacagaccaa

SEQ ID NO: 42813 - DNA, 21 bp, Artificial Sequence
  Description of Artificial Sequence: Synthetic oligonucleotide
tacagaccaggagcaagcgca

SEQ ID NO: 42814 - DNA, 21 bp, Artificial Sequence
  Description of Artificial Sequence: Synthetic oligonucleotide
tacagaccactcagcacacca

SEQ ID NO: 42815 - DNA, 21 bp, Artificial Sequence
  Description of Artificial Sequence: Synthetic oligonucleotide
tacagaccacaagaaaacgac

SEQ ID NO: 42816 - DNA, 21 bp, Artificial Sequence
  Description of Artificial Sequence: Synthetic oligonucleotide
tacagacaagcactcgaccac

SEQ ID NO: 42817 - DNA, 21 bp, Artificial Sequence
  Description of Artificial Sequence: Synthetic oligonucleotide
tacagacaactcgacttccca

SEQ ID NO: 42818 - DNA, 21 bp, Artificial Sequence
  Description of Artificial Sequence: Synthetic oligonucleotide
tacagacaaacaagagaccca

SEQ ID NO: 42819 - DNA, 21 bp, Artificial Sequence
  Description of Artificial Sequence: Synthetic oligonucleotide
tacagacaagtcacagaagtc

SEQ ID NO: 42820 - DNA, 21 bp, Artificial Sequence
  Description of Artificial Sequence: Synthetic oligonucleotide
tacagaagcgacacactcaga

SEQ ID NO: 42821 - DNA, 21 bp, Artificial Sequence
  Description of Artificial Sequence: Synthetic oligonucleotide
tacagaagccacacaccacca

SEQ ID NO: 42822 - DNA, 21 bp, Artificial Sequence
  Description of Artificial Sequence: Synthetic oligonucleotide
tacagaagcatcgtcccagac

SEQ ID NO: 42823 - DNA, 21 bp, Artificial Sequence
  Description of Artificial Sequence: Synthetic oligonucleotide
tacagaagcccagacgaaatg

SEQ ID NO: 42824 - DNA, 21 bp, Artificial Sequence
  Description of Artificial Sequence: Synthetic oligonucleotide
tacagaagcagcacaccagac

SEQ ID NO: 42825 - DNA, 21 bp, Artificial Sequence
  Description of Artificial Sequence: Synthetic oligonucleotide
tacagaagcgtcgtccaaagc

SEQ ID NO: 42826 - DNA, 21 bp, Artificial Sequence
  Description of Artificial Sequence: Synthetic oligonucleotide
tacagaacagcaacaccacca

SEQ ID NO: 42827 - DNA, 21 bp, Artificial Sequence
  Description of Artificial Sequence: Synthetic oligonucleotide
tacagaacagaacaactcgga

SEQ ID NO: 42828 - DNA, 21 bp, Artificial Sequence
  Description of Artificial Sequence: Synthetic oligonucleotide
tacagaacaatcgacagcgga

SEQ ID NO: 42829 - DNA, 21 bp, Artificial Sequence
  Description of Artificial Sequence: Synthetic oligonucleotide
tacagaacactcgacaaccca

SEQ ID NO: 42830 - DNA, 21 bp, Artificial Sequence
  Description of Artificial Sequence: Synthetic oligonucleotide
tacagaacaccagcaagcagc

SEQ ID NO: 42831 - DNA, 21 bp, Artificial Sequence
  Description of Artificial Sequence: Synthetic oligonucleotide
tacagaacacaaccaacacaa

SEQ ID NO: 42832 - DNA, 21 bp, Artificial Sequence
  Description of Artificial Sequence: Synthetic oligonucleotide
tacagagtcgacagcgcaaac

SEQ ID NO: 42833 - DNA, 21 bp, Artificial Sequence
  Description of Artificial Sequence: Synthetic oligonucleotide
tacagagtcagcatgctcagc

SEQ ID NO: 42834 - DNA, 21 bp, Artificial Sequence
  Description of Artificial Sequence: Synthetic oligonucleotide
tacagagtcagcatgagcagc

SEQ ID NO: 42835 - DNA, 21 bp, Artificial Sequence
  Description of Artificial Sequence: Synthetic oligonucleotide
tacagagtcgtcgtcggacca

SEQ ID NO: 42836 - DNA, 21 bp, Artificial Sequence
  Description of Artificial Sequence: Synthetic oligonucleotide
tacagcgcacacagcgcaaga

SEQ ID NO: 42837 - DNA, 21 bp, Artificial Sequence
  Description of Artificial Sequence: Synthetic oligonucleotide
tacagcgcaagcagctacctc

SEQ ID NO: 42838 - DNA, 21 bp, Artificial Sequence
  Description of Artificial Sequence: Synthetic oligonucleotide
tacagcgacccagcaagacca

SEQ ID NO: 42839 - DNA, 21 bp, Artificial Sequence
  Description of Artificial Sequence: Synthetic oligonucleotide
tacagcgacagcccaaaacaa

SEQ ID NO: 42840 - DNA, 21 bp, Artificial Sequence
  Description of Artificial Sequence: Synthetic oligonucleotide
tacagcgacacagacagcagc

SEQ ID NO: 42841 - DNA, 21 bp, Artificial Sequence
  Description of Artificial Sequence: Synthetic oligonucleotide
tacagcgactacggaagacca

SEQ ID NO: 42842 - DNA, 21 bp, Artificial Sequence
  Description of Artificial Sequence: Synthetic oligonucleotide
tacagcgaagcaaacatcaga

SEQ ID NO: 42843 - DNA, 21 bp, Artificial Sequence
  Description of Artificial Sequence: Synthetic oligonucleotide
tacagcgaattcacactcaac

SEQ ID NO: 42844 - DNA, 21 bp, Artificial Sequence
  Description of Artificial Sequence: Synthetic oligonucleotide
tacagcttcccaacaagcgca

SEQ ID NO: 42845 - DNA, 21 bp, Artificial Sequence
  Description of Artificial Sequence: Synthetic oligonucleotide
tacagcggacacgacacaagc

SEQ ID NO: 42846 - DNA, 21 bp, Artificial Sequence
  Description of Artificial Sequence: Synthetic oligonucleotide
tacagcggaagaatcggacca

SEQ ID NO: 42847 - DNA, 21 bp, Artificial Sequence
  Description of Artificial Sequence: Synthetic oligonucleotide
tacagcggaagaccagcaagc

SEQ ID NO: 42848 - DNA, 21 bp, Artificial Sequence
  Description of Artificial Sequence: Synthetic oligonucleotide
tacagcggaagcagcagaaac

SEQ ID NO: 42849 - DNA, 21 bp, Artificial Sequence
  Description of Artificial Sequence: Synthetic oligonucleotide
tacagcggaacaggattcgca

SEQ ID NO: 42850 - DNA, 21 bp, Artificial Sequence
  Description of Artificial Sequence: Synthetic oligonucleotide
tacagccacgcaaacctccca

SEQ ID NO: 42851 - DNA, 21 bp, Artificial Sequence
  Description of Artificial Sequence: Synthetic oligonucleotide
tacagccacgaagcagtcatg

SEQ ID NO: 42852 - DNA, 21 bp, Artificial Sequence
  Description of Artificial Sequence: Synthetic oligonucleotide
tacagccacatcgaaggaagc

SEQ ID NO: 42853 - DNA, 21 bp, Artificial Sequence
  Description of Artificial Sequence: Synthetic oligonucleotide
tacagccacacacaaatgagc

SEQ ID NO: 42854 - DNA, 21 bp, Artificial Sequence
  Description of Artificial Sequence: Synthetic oligonucleotide
tacagccacgtcacaacatgc

SEQ ID NO: 42855 - DNA, 21 bp, Artificial Sequence
  Description of Artificial Sequence: Synthetic oligonucleotide
tacagcatcgcacaccaaagc

SEQ ID NO: 42856 - DNA, 21 bp, Artificial Sequence
  Description of Artificial Sequence: Synthetic oligonucleotide
tacagcctcgcatacagccca

SEQ ID NO: 42857 - DNA, 21 bp, Artificial Sequence
  Description of Artificial Sequence: Synthetic oligonucleotide
tacagcctcgaagacgcacca

SEQ ID NO: 42858 - DNA, 21 bp, Artificial Sequence
  Description of Artificial Sequence: Synthetic oligonucleotide
tacagcctcggaggaccaagc

SEQ ID NO: 42859 - DNA, 21 bp, Artificial Sequence
  Description of Artificial Sequence: Synthetic oligonucleotide
tacagcctcccaacagacctc

SEQ ID NO: 42860 - DNA, 21 bp, Artificial Sequence
  Description of Artificial Sequence: Synthetic oligonucleotide
tacagcctcagccacccaagc

SEQ ID NO: 42861 - DNA, 21 bp, Artificial Sequence
  Description of Artificial Sequence: Synthetic oligonucleotide
tacagcctcacactccacgac

SEQ ID NO: 42862 - DNA, 21 bp, Artificial Sequence
  Description of Artificial Sequence: Synthetic oligonucleotide
tacagcatgcacgcagcaatc

SEQ ID NO: 42863 - DNA, 21 bp, Artificial Sequence
  Description of Artificial Sequence: Synthetic oligonucleotide
tacagcatgaacaaaagccca

SEQ ID NO: 42864 - DNA, 21 bp, Artificial Sequence
  Description of Artificial Sequence: Synthetic oligonucleotide
tacagcatggtcagaacacca

SEQ ID NO: 42865 - DNA, 21 bp, Artificial Sequence
  Description of Artificial Sequence: Synthetic oligonucleotide
tacagcaacgaagcaccaaga

SEQ ID NO: 42866 - DNA, 21 bp, Artificial Sequence
  Description of Artificial Sequence: Synthetic oligonucleotide
tacagcaacgaaaaatgggca

SEQ ID NO: 42867 - DNA, 21 bp, Artificial Sequence
  Description of Artificial Sequence: Synthetic oligonucleotide
tacagcaaccaagcaagagga

SEQ ID NO: 42868 - DNA, 21 bp, Artificial Sequence
  Description of Artificial Sequence: Synthetic oligonucleotide
tacagcccacacttcagacca

SEQ ID NO: 42869 - DNA, 21 bp, Artificial Sequence
  Description of Artificial Sequence: Synthetic oligonucleotide
tacagcccaatcaaaacacac

SEQ ID NO: 42870 - DNA, 21 bp, Artificial Sequence
  Description of Artificial Sequence: Synthetic oligonucleotide
tacagcccaatcagcggaagc

SEQ ID NO: 42871 - DNA, 21 bp, Artificial Sequence
  Description of Artificial Sequence: Synthetic oligonucleotide
tacagcccactcccaagcaga

SEQ ID NO: 42872 - DNA, 21 bp, Artificial Sequence
  Description of Artificial Sequence: Synthetic oligonucleotide
tacagcccactcagccaccac

SEQ ID NO: 42873 - DNA, 21 bp, Artificial Sequence
  Description of Artificial Sequence: Synthetic oligonucleotide
tacagcccaaacctcaacgga

SEQ ID NO: 42874 - DNA, 21 bp, Artificial Sequence
  Description of Artificial Sequence: Synthetic oligonucleotide
tacagcccaccaccaagcatg

SEQ ID NO: 42875 - DNA, 21 bp, Artificial Sequence
  Description of Artificial Sequence: Synthetic oligonucleotide
tacagcccaagaacaccaaca

SEQ ID NO: 42876 - DNA, 21 bp, Artificial Sequence
  Description of Artificial Sequence: Synthetic oligonucleotide
tacagcccaagaacaagcctc

SEQ ID NO: 42877 - DNA, 21 bp, Artificial Sequence
  Description of Artificial Sequence: Synthetic oligonucleotide
tacagcccaacagaagcattc

SEQ ID NO: 42878 - DNA, 21 bp, Artificial Sequence
  Description of Artificial Sequence: Synthetic oligonucleotide
tacagcccaacaagaagcagc

SEQ ID NO: 42879 - DNA, 21 bp, Artificial Sequence
  Description of Artificial Sequence: Synthetic oligonucleotide
tacagccaaagaggagcagac

SEQ ID NO: 42880 - DNA, 21 bp, Artificial Sequence
  Description of Artificial Sequence: Synthetic oligonucleotide
tacagccaaagaaacgacagc

SEQ ID NO: 42881 - DNA, 21 bp, Artificial Sequence
  Description of Artificial Sequence: Synthetic oligonucleotide
tacagcagaccaagcccactc

SEQ ID NO: 42882 - DNA, 21 bp, Artificial Sequence
  Description of Artificial Sequence: Synthetic oligonucleotide
tacagcagcggaggactcaga

SEQ ID NO: 42883 - DNA, 21 bp, Artificial Sequence
  Description of Artificial Sequence: Synthetic oligonucleotide
tacagcagccacctcagaaac

SEQ ID NO: 42884 - DNA, 21 bp, Artificial Sequence
  Description of Artificial Sequence: Synthetic oligonucleotide
tacagcagccacagcagcagc

SEQ ID NO: 42885 - DNA, 21 bp, Artificial Sequence
  Description of Artificial Sequence: Synthetic oligonucleotide
tacagcagcctcgcagcactc

SEQ ID NO: 42886 - DNA, 21 bp, Artificial Sequence
  Description of Artificial Sequence: Synthetic oligonucleotide
tacagcagcaacctcgcaaga

SEQ ID NO: 42887 - DNA, 21 bp, Artificial Sequence
  Description of Artificial Sequence: Synthetic oligonucleotide
tacagcagcccagactggagc

SEQ ID NO: 42888 - DNA, 21 bp, Artificial Sequence
  Description of Artificial Sequence: Synthetic oligonucleotide
tacagcagcccaccaatcaca

SEQ ID NO: 42889 - DNA, 21 bp, Artificial Sequence
  Description of Artificial Sequence: Synthetic oligonucleotide
tacagcagccaactcagcgaa

SEQ ID NO: 42890 - DNA, 21 bp, Artificial Sequence
  Description of Artificial Sequence: Synthetic oligonucleotide
tacagcagcagaggagaagca

SEQ ID NO: 42891 - DNA, 21 bp, Artificial Sequence
  Description of Artificial Sequence: Synthetic oligonucleotide
tacagcagcagcgtcctcgca

SEQ ID NO: 42892 - DNA, 21 bp, Artificial Sequence
  Description of Artificial Sequence: Synthetic oligonucleotide
tacagcacagacagatacagc

SEQ ID NO: 42893 - DNA, 21 bp, Artificial Sequence
  Description of Artificial Sequence: Synthetic oligonucleotide
tacagcacattccaaccagaa

SEQ ID NO: 42894 - DNA, 21 bp, Artificial Sequence
  Description of Artificial Sequence: Synthetic oligonucleotide
tacagcacaatgagaagcatg

SEQ ID NO: 42895 - DNA, 21 bp, Artificial Sequence
  Description of Artificial Sequence: Synthetic oligonucleotide
tacagcacacaaagcctcaac

SEQ ID NO: 42896 - DNA, 21 bp, Artificial Sequence
  Description of Artificial Sequence: Synthetic oligonucleotide
tacagcacaagaagcctcagc

SEQ ID NO: 42897 - DNA, 21 bp, Artificial Sequence
  Description of Artificial Sequence: Synthetic oligonucleotide
tacagcacaacaggaagactc

SEQ ID NO: 42898 - DNA, 21 bp, Artificial Sequence
  Description of Artificial Sequence: Synthetic oligonucleotide
tacagcacaacagtccacgca

SEQ ID NO: 42899 - DNA, 21 bp, Artificial Sequence
  Description of Artificial Sequence: Synthetic oligonucleotide
tacagcacagtcggaagcagc

SEQ ID NO: 42900 - DNA, 21 bp, Artificial Sequence
  Description of Artificial Sequence: Synthetic oligonucleotide
tacagcgtcgacgcagtctgg

SEQ ID NO: 42901 - DNA, 21 bp, Artificial Sequence
  Description of Artificial Sequence: Synthetic oligonucleotide
tacagcgtcagaacaatgagc

SEQ ID NO: 42902 - DNA, 21 bp, Artificial Sequence
  Description of Artificial Sequence: Synthetic oligonucleotide
tacagcgtcgtcacagtcgac

SEQ ID NO: 42903 - DNA, 21 bp, Artificial Sequence
  Description of Artificial Sequence: Synthetic oligonucleotide
tacagctacaacagcgaccac

SEQ ID NO: 42904 - DNA, 21 bp, Artificial Sequence
  Description of Artificial Sequence: Synthetic oligonucleotide
tacacagcaggagtcagcgca

SEQ ID NO: 42905 - DNA, 21 bp, Artificial Sequence
  Description of Artificial Sequence: Synthetic oligonucleotide
tacacagcaagagcacaaagc

SEQ ID NO: 42906 - DNA, 21 bp, Artificial Sequence
  Description of Artificial Sequence: Synthetic oligonucleotide
tacacagcaagcggagacatc

SEQ ID NO: 42907 - DNA, 21 bp, Artificial Sequence
  Description of Artificial Sequence: Synthetic oligonucleotide
tacacagaattcgcagcaaac

SEQ ID NO: 42908 - DNA, 21 bp, Artificial Sequence
  Description of Artificial Sequence: Synthetic oligonucleotide
tacacaggattcacactcgac

SEQ ID NO: 42909 - DNA, 21 bp, Artificial Sequence
  Description of Artificial Sequence: Synthetic oligonucleotide
tacacaggaggacaactccac

SEQ ID NO: 42910 - DNA, 21 bp, Artificial Sequence
  Description of Artificial Sequence: Synthetic oligonucleotide
tacacaggactcgaaccaagc

SEQ ID NO: 42911 - DNA, 21 bp, Artificial Sequence
  Description of Artificial Sequence: Synthetic oligonucleotide
tacacaggaagcagcgtcctc

SEQ ID NO: 42912 - DNA, 21 bp, Artificial Sequence
  Description of Artificial Sequence: Synthetic oligonucleotide
tacacacacctcacaacagca

SEQ ID NO: 42913 - DNA, 21 bp, Artificial Sequence
  Description of Artificial Sequence: Synthetic oligonucleotide
tacacacacagcatcgtcaca

SEQ ID NO: 42914 - DNA, 21 bp, Artificial Sequence
  Description of Artificial Sequence: Synthetic oligonucleotide
tacacacacgtcctcacacca

SEQ ID NO: 42915 - DNA, 21 bp, Artificial Sequence
  Description of Artificial Sequence: Synthetic oligonucleotide
tacacaaaaatgctcggacca

SEQ ID NO: 42916 - DNA, 21 bp, Artificial Sequence
  Description of Artificial Sequence: Synthetic oligonucleotide
tacacaaaaaacagcacagtc

SEQ ID NO: 42917 - DNA, 21 bp, Artificial Sequence
  Description of Artificial Sequence: Synthetic oligonucleotide
tacacactcgaccaactcagc

SEQ ID NO: 42918 - DNA, 21 bp, Artificial Sequence
  Description of Artificial Sequence: Synthetic oligonucleotide
tacacactcagcgcaacaaca

SEQ ID NO: 42919 - DNA, 21 bp, Artificial Sequence
  Description of Artificial Sequence: Synthetic oligonucleotide
tacacaatgagcccaagacca

SEQ ID NO: 42920 - DNA, 21 bp, Artificial Sequence
  Description of Artificial Sequence: Synthetic oligonucleotide
tacacaaacgacagaagaagc

SEQ ID NO: 42921 - DNA, 21 bp, Artificial Sequence
  Description of Artificial Sequence: Synthetic oligonucleotide
tacacaaacaacttcgtcgca

SEQ ID NO: 42922 - DNA, 21 bp, Artificial Sequence
  Description of Artificial Sequence: Synthetic oligonucleotide
tacacaccagcaggactcagc

SEQ ID NO: 42923 - DNA, 21 bp, Artificial Sequence
  Description of Artificial Sequence: Synthetic oligonucleotide
tacacaccacacagaatgagc

SEQ ID NO: 42924 - DNA, 21 bp, Artificial Sequence
  Description of Artificial Sequence: Synthetic oligonucleotide
tacacaccactcatgagcagc

SEQ ID NO: 42925 - DNA, 21 bp, Artificial Sequence
  Description of Artificial Sequence: Synthetic oligonucleotide
tacacacaaagcaaaacagaa

SEQ ID NO: 42926 - DNA, 21 bp, Artificial Sequence
  Description of Artificial Sequence: Synthetic oligonucleotide
tacacacaaacaacatggaaa

SEQ ID NO: 42927 - DNA, 21 bp, Artificial Sequence
  Description of Artificial Sequence: Synthetic oligonucleotide
tacacaagagcaccagacgga

SEQ ID NO: 42928 - DNA, 21 bp, Artificial Sequence
  Description of Artificial Sequence: Synthetic oligonucleotide
tacacaagccacccaacatgc

SEQ ID NO: 42929 - DNA, 21 bp, Artificial Sequence
  Description of Artificial Sequence: Synthetic oligonucleotide
tacacaagcatcagcaacatg

SEQ ID NO: 42930 - DNA, 21 bp, Artificial Sequence
  Description of Artificial Sequence: Synthetic oligonucleotide
tacacaagcctcagcatggca

SEQ ID NO: 42931 - DNA, 21 bp, Artificial Sequence
  Description of Artificial Sequence: Synthetic oligonucleotide
tacacaagcatgcacgtcagc

SEQ ID NO: 42932 - DNA, 21 bp, Artificial Sequence
  Description of Artificial Sequence: Synthetic oligonucleotide
tacacaagcaacatcgacatg

SEQ ID NO: 42933 - DNA, 21 bp, Artificial Sequence
  Description of Artificial Sequence: Synthetic oligonucleotide
tacacaagcccagcacacgtc

SEQ ID NO: 42934 - DNA, 21 bp, Artificial Sequence
  Description of Artificial Sequence: Synthetic oligonucleotide
tacacaagcagacacatcgca

SEQ ID NO: 42935 - DNA, 21 bp, Artificial Sequence
  Description of Artificial Sequence: Synthetic oligonucleotide
tacacaagcagagtcctcagc

SEQ ID NO: 42936 - DNA, 21 bp, Artificial Sequence
  Description of Artificial Sequence: Synthetic oligonucleotide
tacacaagcgtctacgcacac

SEQ ID NO: 42937 - DNA, 21 bp, Artificial Sequence
  Description of Artificial Sequence: Synthetic oligonucleotide
tacacaagctacacagcacca

SEQ ID NO: 42938 - DNA, 21 bp, Artificial Sequence
  Description of Artificial Sequence: Synthetic oligonucleotide
tacacaacactcccagcaaga

SEQ ID NO: 42939 - DNA, 21 bp, Artificial Sequence
  Description of Artificial Sequence: Synthetic oligonucleotide
tacacaacaaacagacaaagc

SEQ ID NO: 42940 - DNA, 21 bp, Artificial Sequence
  Description of Artificial Sequence: Synthetic oligonucleotide
tacacaacaagcccagcactc

SEQ ID NO: 42941 - DNA, 21 bp, Artificial Sequence
  Description of Artificial Sequence: Synthetic oligonucleotide
tacacaacaagcccaatcaaa

SEQ ID NO: 42942 - DNA, 21 bp, Artificial Sequence
  Description of Artificial Sequence: Synthetic oligonucleotide
tacacagtcagacacgtcaac

SEQ ID NO: 42943 - DNA, 21 bp, Artificial Sequence
  Description of Artificial Sequence: Synthetic oligonucleotide
tacgtcgcaacagaacaaaaa

SEQ ID NO: 42944 - DNA, 21 bp, Artificial Sequence
  Description of Artificial Sequence: Synthetic oligonucleotide
tacgtcgacgacccaagcgga

SEQ ID NO: 42945 - DNA, 21 bp, Artificial Sequence
  Description of Artificial Sequence: Synthetic oligonucleotide
tacgtccacctcaacacaaca

SEQ ID NO: 42946 - DNA, 21 bp, Artificial Sequence
  Description of Artificial Sequence: Synthetic oligonucleotide
tacgtcaaactctacgaaaaa

SEQ ID NO: 42947 - DNA, 21 bp, Artificial Sequence
  Description of Artificial Sequence: Synthetic oligonucleotide
tacgtcaaaccaaacggagca

SEQ ID NO: 42948 - DNA, 21 bp, Artificial Sequence
  Description of Artificial Sequence: Synthetic oligonucleotide
tacgtcaaaagccaaacagca

SEQ ID NO: 42949 - DNA, 21 bp, Artificial Sequence
  Description of Artificial Sequence: Synthetic oligonucleotide
tacgtcatgagccaaagcgca

SEQ ID NO: 42950 - DNA, 21 bp, Artificial Sequence
  Description of Artificial Sequence: Synthetic oligonucleotide
tacgtcccaggaagaaacgaa

SEQ ID NO: 42951 - DNA, 21 bp, Artificial Sequence
  Description of Artificial Sequence: Synthetic oligonucleotide
tacgtcccaatgacaagccca

SEQ ID NO: 42952 - DNA, 21 bp, Artificial Sequence
  Description of Artificial Sequence: Synthetic oligonucleotide
tacgtcccaacaagcctcgga

SEQ ID NO: 42953 - DNA, 21 bp, Artificial Sequence
  Description of Artificial Sequence: Synthetic oligonucleotide
tacgtccaacaacacgtcaaa

SEQ ID NO: 42954 - DNA, 21 bp, Artificial Sequence
  Description of Artificial Sequence: Synthetic oligonucleotide
tacgtcagaggaatggacgca

SEQ ID NO: 42955 - DNA, 21 bp, Artificial Sequence
  Description of Artificial Sequence: Synthetic oligonucleotide
tacgtcagagtcagcaacgtc

SEQ ID NO: 42956 - DNA, 21 bp, Artificial Sequence
  Description of Artificial Sequence: Synthetic oligonucleotide
tacgtcagccacgtcgacctc

SEQ ID NO: 42957 - DNA, 21 bp, Artificial Sequence
  Description of Artificial Sequence: Synthetic oligonucleotide
tacgtcagcatgccaaacgga

SEQ ID NO: 42958 - DNA, 21 bp, Artificial Sequence
  Description of Artificial Sequence: Synthetic oligonucleotide
tacgtcacagacagaatgcca

SEQ ID NO: 42959 - DNA, 21 bp, Artificial Sequence
  Description of Artificial Sequence: Synthetic oligonucleotide
tacgtcacaggacaccacgac

SEQ ID NO: 42960 - DNA, 21 bp, Artificial Sequence
  Description of Artificial Sequence: Synthetic oligonucleotide
tacgtcacaaaagcaccactc

SEQ ID NO: 42961 - DNA, 21 bp, Artificial Sequence
  Description of Artificial Sequence: Synthetic oligonucleotide
tacgtcacacaaatccacgga

SEQ ID NO: 42962 - DNA, 21 bp, Artificial Sequence
  Description of Artificial Sequence: Synthetic oligonucleotide
tacgtcgtcgaaccagaacca

SEQ ID NO: 42963 - DNA, 21 bp, Artificial Sequence
  Description of Artificial Sequence: Synthetic oligonucleotide
tacgtcgtcaacctcccaaga

SEQ ID NO: 42964 - DNA, 21 bp, Artificial Sequence
  Description of Artificial Sequence: Synthetic oligonucleotide
tacgtcgtcagagcagacgga

SEQ ID NO: 42965 - DNA, 21 bp, Artificial Sequence
  Description of Artificial Sequence: Synthetic oligonucleotide
tactacgacagaagcatcgga

SEQ ID NO: 42966 - DNA, 21 bp, Artificial Sequence
  Description of Artificial Sequence: Synthetic oligonucleotide
tactacgaaagcagcaaacaa

SEQ ID NO: 42967 - DNA, 21 bp, Artificial Sequence
  Description of Artificial Sequence: Synthetic oligonucleotide
tactacggaagcgcaccagca

SEQ ID NO: 42968 - DNA, 21 bp, Artificial Sequence
  Description of Artificial Sequence: Synthetic oligonucleotide
tactacggagtccacccaaac

SEQ ID NO: 42969 - DNA, 21 bp, Artificial Sequence
  Description of Artificial Sequence: Synthetic oligonucleotide
tactacaacccaagcacaagc

SEQ ID NO: 42970 - DNA, 21 bp, Artificial Sequence
  Description of Artificial Sequence: Synthetic oligonucleotide
tactacccaagaccaggagga

SEQ ID NO: 42971 - DNA, 21 bp, Artificial Sequence
  Description of Artificial Sequence: Synthetic oligonucleotide
tactacagcgcaatggcagac

SEQ ID NO: 42972 - DNA, 21 bp, Artificial Sequence
  Description of Artificial Sequence: Synthetic oligonucleotide
tactacagcaacacagtcaca

SEQ ID NO: 42973 - protein, 9 aa, Artificial Sequence
  Description of Artificial Sequence: Synthetic peptide
DGSPTVPFK

SEQ ID NO: 42974 - protein, 9 aa, Artificial Sequence
  Description of Artificial Sequence: Synthetic peptide
DGTLEVPFK

SEQ ID NO: 42975 - protein, 9 aa, Artificial Sequence
  Description of Artificial Sequence: Synthetic peptide
DGTPQVPFK

SEQ ID NO: 42976 - protein, 9 aa, Artificial Sequence
  Description of Artificial Sequence: Synthetic peptide
DGTPTVPFK

SEQ ID NO: 42977 - protein, 9 aa, Artificial Sequence
  Description of Artificial Sequence: Synthetic peptide
DGDLQVPFK

SEQ ID NO: 42978 - protein, 9 aa, Artificial Sequence
  Description of Artificial Sequence: Synthetic peptide
DGDLRVPFK

SEQ ID NO: 42979 - protein, 9 aa, Artificial Sequence
  Description of Artificial Sequence: Synthetic peptide
DGNLTVPFK

SEQ ID NO: 42980 - protein, 9 aa, Artificial Sequence
  Description of Artificial Sequence: Synthetic peptide
DGQPTVPFK

SEQ ID NO: 42981 - protein, 9 aa, Artificial Sequence
  Description of Artificial Sequence: Synthetic peptide
DGSIQVPFK

SEQ ID NO: 42982 - protein, 9 aa, Artificial Sequence
  Description of Artificial Sequence: Synthetic peptide
DGSLKVPFK

SEQ ID NO: 42983 - protein, 9 aa, Artificial Sequence
  Description of Artificial Sequence: Synthetic peptide
DGSPQVPFK

SEQ ID NO: 42984 - protein, 9 aa, Artificial Sequence
  Description of Artificial Sequence: Synthetic peptide
DGSRSVPFK

SEQ ID NO: 42985 - protein, 9 aa, Artificial Sequence
  Description of Artificial Sequence: Synthetic peptide
DGSTTVPFK

SEQ ID NO: 42986 - protein, 9 aa, Artificial Sequence
  Description of Artificial Sequence: Synthetic peptide
DGTARVPFK

SEQ ID NO: 42987 - protein, 9 aa, Artificial Sequence
  Description of Artificial Sequence: Synthetic peptide
DGTEKVPFK

SEQ ID NO: 42988 - protein, 9 aa, Artificial Sequence
  Description of Artificial Sequence: Synthetic peptide
DGTLHVPFK

SEQ ID NO: 42989 - protein, 9 aa, Artificial Sequence
  Description of Artificial Sequence: Synthetic peptide
DGTLNVPFK

SEQ ID NO: 42990 - protein, 9 aa, Artificial Sequence
  Description of Artificial Sequence: Synthetic peptide
DGTLQVPFK

SEQ ID NO: 42991 - protein, 9 aa, Artificial Sequence
  Description of Artificial Sequence: Synthetic peptide
DGTLSVPFK

SEQ ID NO: 42992 - protein, 9 aa, Artificial Sequence
  Description of Artificial Sequence: Synthetic peptide
DGTPLVPFK

SEQ ID NO: 42993 - protein, 9 aa, Artificial Sequence
  Description of Artificial Sequence: Synthetic peptide
DGTPPVPFK

SEQ ID NO: 42994 - protein, 9 aa, Artificial Sequence
  Description of Artificial Sequence: Synthetic peptide
DGTQAVPFK

SEQ ID NO: 42995 - protein, 9 aa, Artificial Sequence
  Description of Artificial Sequence: Synthetic peptide
DGTREVPFK

SEQ ID NO: 42996 - protein, 9 aa, Artificial Sequence
  Description of Artificial Sequence: Synthetic peptide
DGTRQVPFK

SEQ ID NO: 42997 - protein, 9 aa, Artificial Sequence
  Description of Artificial Sequence: Synthetic peptide
DGTRTVPFK

SEQ ID NO: 42998 - protein, 9 aa, Artificial Sequence
  Description of Artificial Sequence: Synthetic peptide
DGTSKVPFK

SEQ ID NO: 42999 - protein, 9 aa, Artificial Sequence
  Description of Artificial Sequence: Synthetic peptide
DGTVNVPFK

SEQ ID NO: 43000 - DNA, 27 bp, Artificial Sequence
  Description of Artificial Sequence: Synthetic oligonucleotide
gatgggtcgcctactgtgccttttaag

SEQ ID NO: 43001 - DNA, 27 bp, Artificial Sequence
  Description of Artificial Sequence: Synthetic oligonucleotide
gatgggactctggaggtgccttttaag

SEQ ID NO: 43002 - DNA, 27 bp, Artificial Sequence
  Description of Artificial Sequence: Synthetic oligonucleotide
gatgggacgccgcaggtgccttttaag

SEQ ID NO: 43003 - DNA, 27 bp, Artificial Sequence
  Description of Artificial Sequence: Synthetic oligonucleotide
gatgggacgccgactgtgccttttaag

SEQ ID NO: 43004 - DNA, 27 bp, Artificial Sequence
  Description of Artificial Sequence: Synthetic oligonucleotide
gatggggatttgcaggtgccttttaag

SEQ ID NO: 43005 - DNA, 27 bp, Artificial Sequence
  Description of Artificial Sequence: Synthetic oligonucleotide
gatggggatttgagggtgccttttaag

SEQ ID NO: 43006 - DNA, 27 bp, Artificial Sequence
  Description of Artificial Sequence: Synthetic oligonucleotide
gatgggaatcttacggtgccttttaag

SEQ ID NO: 43007 - DNA, 27 bp, Artificial Sequence
  Description of Artificial Sequence: Synthetic oligonucleotide
gatgggcagcctacggtgccttttaag

SEQ ID NO: 43008 - DNA, 27 bp, Artificial Sequence
  Description of Artificial Sequence: Synthetic oligonucleotide
gatgggtcgattcaggtgccttttaag

SEQ ID NO: 43009 - DNA, 27 bp, Artificial Sequence
  Description of Artificial Sequence: Synthetic oligonucleotide
gatgggtcgttgaaggtgccttttaag

SEQ ID NO: 43010 - DNA, 27 bp, Artificial Sequence
  Description of Artificial Sequence: Synthetic oligonucleotide
gatgggtcgccgcaggtgccttttaag

SEQ ID NO: 43011 - DNA, 27 bp, Artificial Sequence
  Description of Artificial Sequence: Synthetic oligonucleotide
gatgggtcgcggtcggtgccgtttaag

SEQ ID NO: 43012 - DNA, 27 bp, Artificial Sequence
  Description of Artificial Sequence: Synthetic oligonucleotide
gatgggtcgactactgtgccttttaag

SEQ ID NO: 43013 - DNA, 27 bp, Artificial Sequence
  Description of Artificial Sequence: Synthetic oligonucleotide
gatgggacggcgcgggtgccttttaag

SEQ ID NO: 43014 - DNA, 27 bp, Artificial Sequence
  Description of Artificial Sequence: Synthetic oligonucleotide
gatgggactgagaaggtgccttttaag

SEQ ID NO: 43015 - DNA, 27 bp, Artificial Sequence
  Description of Artificial Sequence: Synthetic oligonucleotide
gatgggactctgcatgtgccttttaag

SEQ ID NO: 43016 - DNA, 27 bp, Artificial Sequence
  Description of Artificial Sequence: Synthetic oligonucleotide
gatgggactcttaatgtgccttttaag

SEQ ID NO: 43017 - DNA, 27 bp, Artificial Sequence
  Description of Artificial Sequence: Synthetic oligonucleotide
gatgggactctgcaggtgccttttaag

SEQ ID NO: 43018 - DNA, 27 bp, Artificial Sequence
  Description of Artificial Sequence: Synthetic oligonucleotide
gatgggacgctgagtgtgccttttaag

SEQ ID NO: 43019 - DNA, 27 bp, Artificial Sequence
  Description of Artificial Sequence: Synthetic oligonucleotide
gatgggactcctttggtgccttttaag

SEQ ID NO: 43020 - DNA, 27 bp, Artificial Sequence
  Description of Artificial Sequence: Synthetic oligonucleotide
gatgggactccgcctgtgccttttaag

SEQ ID NO: 43021 - DNA, 27 bp, Artificial Sequence
  Description of Artificial Sequence: Synthetic oligonucleotide
gatgggacgcaggcggtgccttttaag

SEQ ID NO: 43022 - DNA, 27 bp, Artificial Sequence
  Description of Artificial Sequence: Synthetic oligonucleotide
gatgggacgcgtgaggtgccttttaag

SEQ ID NO: 43023 - DNA, 27 bp, Artificial Sequence
  Description of Artificial Sequence: Synthetic oligonucleotide
gatgggactaggcaggtgccttttaag

SEQ ID NO: 43024 - DNA, 27 bp, Artificial Sequence
  Description of Artificial Sequence: Synthetic oligonucleotide
gatgggacgcgtactgtgccttttaag

SEQ ID NO: 43025 - DNA, 27 bp, Artificial Sequence
  Description of Artificial Sequence: Synthetic oligonucleotide
gatgggacgagtaaggtgccttttaag

SEQ ID NO: 43026 - DNA, 27 bp, Artificial Sequence
  Description of Artificial Sequence: Synthetic oligonucleotide
gatgggacggttaatgtgccttttaag

SEQ ID NO: 43027 - DNA, 27 bp, Artificial Sequence
  Description of Artificial Sequence: Synthetic oligonucleotide
gatgggtctcctacggtgccttttaag

SEQ ID NO: 43028 - DNA, 27 bp, Artificial Sequence
  Description of Artificial Sequence: Synthetic oligonucleotide
gatgggacgttggaggtgccttttaag

SEQ ID NO: 43029 - DNA, 27 bp, Artificial Sequence
  Description of Artificial Sequence: Synthetic oligonucleotide
gatgggactcctcaggtgccttttaag

SEQ ID NO: 43030 - DNA, 27 bp, Artificial Sequence
  Description of Artificial Sequence: Synthetic oligonucleotide
gatgggactccgacggtgccttttaag

SEQ ID NO: 43031 - DNA, 27 bp, Artificial Sequence
  Description of Artificial Sequence: Synthetic oligonucleotide
gacggagacctccaagtcccattcaaa

SEQ ID NO: 43032 - DNA, 27 bp, Artificial Sequence
  Description of Artificial Sequence: Synthetic oligonucleotide
gacggagacctcagagtcccattcaaa

SEQ ID NO: 43033 - DNA, 27 bp, Artificial Sequence
  Description of Artificial Sequence: Synthetic oligonucleotide
gacggaaacctcacagtcccattcaaa

SEQ ID NO: 43034 - DNA, 27 bp, Artificial Sequence
  Description of Artificial Sequence: Synthetic oligonucleotide
gacggacaaccaacagtcccattcaaa

SEQ ID NO: 43035 - DNA, 27 bp, Artificial Sequence
  Description of Artificial Sequence: Synthetic oligonucleotide
gacggaagcatccaagtcccattcaaa

SEQ ID NO: 43036 - DNA, 27 bp, Artificial Sequence
  Description of Artificial Sequence: Synthetic oligonucleotide
gacggaagcctcaaagtcccattcaaa

SEQ ID NO: 43037 - DNA, 27 bp, Artificial Sequence
  Description of Artificial Sequence: Synthetic oligonucleotide
gacggaagcccacaagtcccattcaaa

SEQ ID NO: 43038 - DNA, 27 bp, Artificial Sequence
  Description of Artificial Sequence: Synthetic oligonucleotide
gacggaagcagaagcgtcccattcaaa

SEQ ID NO: 43039 - DNA, 27 bp, Artificial Sequence
  Description of Artificial Sequence: Synthetic oligonucleotide
gacggaagcacaacagtcccattcaaa

SEQ ID NO: 43040 - DNA, 27 bp, Artificial Sequence
  Description of Artificial Sequence: Synthetic oligonucleotide
gacggaacagcaagagtcccattcaaa

SEQ ID NO: 43041 - DNA, 27 bp, Artificial Sequence
  Description of Artificial Sequence: Synthetic oligonucleotide
gacggaacagaaaaagtcccattcaaa

SEQ ID NO: 43042 - DNA, 27 bp, Artificial Sequence
  Description of Artificial Sequence: Synthetic oligonucleotide
gacggaacactccacgtcccattcaaa

SEQ ID NO: 43043 - DNA, 27 bp, Artificial Sequence
  Description of Artificial Sequence: Synthetic oligonucleotide
gacggaacactcaacgtcccattcaaa

SEQ ID NO: 43044 - DNA, 27 bp, Artificial Sequence
  Description of Artificial Sequence: Synthetic oligonucleotide
gacggaacactccaagtcccattcaaa

SEQ ID NO: 43045 - DNA, 27 bp, Artificial Sequence
  Description of Artificial Sequence: Synthetic oligonucleotide
gacggaacactcagcgtcccattcaaa

SEQ ID NO: 43046 - DNA, 27 bp, Artificial Sequence
  Description of Artificial Sequence: Synthetic oligonucleotide
gacggaacaccactcgtcccattcaaa

SEQ ID NO: 43047 - DNA, 27 bp, Artificial Sequence
  Description of Artificial Sequence: Synthetic oligonucleotide
gacggaacaccaccagtcccattcaaa

SEQ ID NO: 43048 - DNA, 27 bp, Artificial Sequence
  Description of Artificial Sequence: Synthetic oligonucleotide
gacggaacacaagcagtcccattcaaa

SEQ ID NO: 43049 - DNA, 27 bp, Artificial Sequence
  Description of Artificial Sequence: Synthetic oligonucleotide
gacggaacaagagaagtcccattcaaa

SEQ ID NO: 43050 - DNA, 27 bp, Artificial Sequence
  Description of Artificial Sequence: Synthetic oligonucleotide
gacggaacaagacaagtcccattcaaa

SEQ ID NO: 43051 - DNA, 27 bp, Artificial Sequence
  Description of Artificial Sequence: Synthetic oligonucleotide
gacggaacaagaacagtcccattcaaa

SEQ ID NO: 43052 - DNA, 27 bp, Artificial Sequence
  Description of Artificial Sequence: Synthetic oligonucleotide
gacggaacaagcaaagtcccattcaaa

SEQ ID NO: 43053 - DNA, 27 bp, Artificial Sequence
  Description of Artificial Sequence: Synthetic oligonucleotide
gacggaacagtcaacgtcccattcaaa

SEQ ID NO: 43054 - protein, 7 aa, Artificial Sequence
  Description of Artificial Sequence: Synthetic peptide
TLAVPFK

SEQ ID NO: 43055 - protein, 7 aa, Artificial Sequence
  Description of Artificial Sequence: Synthetic peptide
YTLSQGW

SEQ ID NO: 43056 - protein, 7 aa, Artificial Sequence
  Description of Artificial Sequence: Synthetic peptide
SVSKPFL

SEQ ID NO: 43057 - protein, 7 aa, Artificial Sequence
  Description of Artificial Sequence: Synthetic peptide
FTLTTPK

SEQ ID NO: 43058 - protein, 7 aa, Artificial Sequence
  Description of Artificial Sequence: Synthetic peptide
QAVRTSL

SEQ ID NO: 43059 - protein, 11 aa, Artificial Sequence
  Description of Artificial Sequence: Synthetic peptide
DGTLAVPFKAQ

SEQ ID NO: 43060 - protein, 7 aa, Artificial Sequence
  Description of Artificial Sequence: Synthetic peptide
MNSTKNV

SEQ ID NO: 43061 - protein, 7 aa, Artificial Sequence
  Description of Artificial Sequence: Synthetic peptide
VSGGHHS

SEQ ID NO: 43062 - protein, 11 aa, Artificial Sequence
  Description of Artificial Sequence: Synthetic peptide
ESTLAVPFKAQ

SEQ ID NO: 43063 - protein, 11 aa, Artificial Sequence
  Description of Artificial Sequence: Synthetic peptide
GGTLAVPFKAQ

SEQ ID NO: 43064 - protein, 11 aa, Artificial Sequence
  Description of Artificial Sequence: Synthetic peptide
AQTLATPFKAQ

SEQ ID NO: 43065 - protein, 11 aa, Artificial Sequence
  Description of Artificial Sequence: Synthetic peptide
ATTLATPFKAQ

SEQ ID NO: 43066 - protein, 11 aa, Artificial Sequence
  Description of Artificial Sequence: Synthetic peptide
DGTLATPFKAQ

SEQ ID NO: 43067 - protein, 11 aa, Artificial Sequence
  Description of Artificial Sequence: Synthetic peptide
GGTLATPFKAQ

SEQ ID NO: 43068 - protein, 11 aa, Artificial Sequence
  Description of Artificial Sequence: Synthetic peptide
SGSLAVPFKAQ

SEQ ID NO: 43069 - protein, 11 aa, Artificial Sequence
  Description of Artificial Sequence: Synthetic peptide
AQTLAQPFKAQ

SEQ ID NO: 43070 - protein, 11 aa, Artificial Sequence
  Description of Artificial Sequence: Synthetic peptide
AQTLQQPFKAQ

SEQ ID NO: 43071 - protein, 11 aa, Artificial Sequence
  Description of Artificial Sequence: Synthetic peptide
AQTLSNPFKAQ

SEQ ID NO: 43072 - protein, 11 aa, Artificial Sequence
  Description of Artificial Sequence: Synthetic peptide
AQTLAVPFSNP
